United States Patent Application Publication US 2023/0416736 A1 - sequence listing, part 2

SEQ ID NO: 2897 - RNA, 23 nt, synthetic construct
  source 1..23: mol_type = other RNA
  modified_base 1: mod_base = OTHER; note = 2'-O-methyluridine-3'-phosphorothioate 5'-(E)-Vinylphosphonate
  modified_base 2: mod_base = OTHER; note = 2'-deoxy-2'-fluoroguanosine-3'-phosphorothioate
  modified_base 3: mod_base = OTHER; note = 2'-O-methyluridine-3'-phosphate
  modified_base 4: mod_base = OTHER; note = 2'-O-methylcytidine-3'-phosphate
  modified_base 5: mod_base = OTHER; note = 2'-O-methyluridine-3'-phosphate
  modified_base 6: mod_base = OTHER; note = 2'-deoxy-2'-fluorouridine-3'-phosphate
  modified_base 7: mod_base = OTHER; note = 2'-O-methyladenosine-3'-phosphate
  modified_base 8: mod_base = OTHER; note = 2'-deoxy-2'-fluorouridine-3'-phosphate
  modified_base 9: mod_base = OTHER; note = 2'-deoxy-2'-fluorouridine-3'-phosphate
  modified_base 10: mod_base = OTHER; note = 2'-O-methylguanosine-3'-phosphate
  modified_base 11: mod_base = OTHER; note = 2'-O-methyluridine-3'-phosphate
  modified_base 12: mod_base = OTHER; note = 2'-O-methyladenosine-3'-phosphate
  modified_base 13: mod_base = OTHER; note = 2'-O-methylguanosine-3'-phosphate
  modified_base 14: mod_base = OTHER; note = 2'-deoxy-2'-fluoroadenosine-3'-phosphate
  modified_base 15: mod_base = OTHER; note = 2'-O-methyluridine-3'-phosphate
  modified_base 16: mod_base = OTHER; note = 2'-deoxy-2'-fluoroguanosine-3'-phosphate
  modified_base 17: mod_base = OTHER; note = 2'-O-methyladenosine-3'-phosphate
  modified_base 18: mod_base = OTHER; note = 2'-O-methylcytidine-3'-phosphate
  modified_base 19: mod_base = OTHER; note = 2'-O-methyluridine-3'-phosphate
  modified_base 20: mod_base = OTHER; note = 2'-O-methyluridine-3'-phosphate
  modified_base 21: mod_base = OTHER; note = 2'-O-methylcytidine-3'-phosphorothioate
  modified_base 22: mod_base = OTHER; note = 2'-O-methylcytidine-3'-phosphorothioate
  modified_base 23: mod_base = OTHER; note = 2'-O-methylcytidine
tgtcttattgtagatgacttccc

SEQ ID NO: 2898 - RNA, 23 nt, synthetic construct
  source 1..23: mol_type = other RNA
  modified_base 1: mod_base = OTHER; note = 2'-O-methyluridine-3'-phosphorothioate 5'-(E)-Vinylphosphonate
  modified_base 2: mod_base = OTHER; note = 2'-deoxy-2'-fluoroadenosine-3'-phosphorothioate
  modified_base 3: mod_base = OTHER; note = 2'-O-methylcytidine-3'-phosphate
  modified_base 4: mod_base = OTHER; note = 2'-O-methyladenosine-3'-phosphate
  modified_base 5: mod_base = OTHER; note = 2'-O-methylcytidine-3'-phosphate
  modified_base 6: mod_base = OTHER; note = 2'-deoxy-2'-fluorouridine-3'-phosphate
  modified_base 7: mod_base = OTHER; note = 2'-O-methylguanosine-3'-phosphate
  modified_base 8: mod_base = OTHER; note = 2'-deoxy-2'-fluorocytidine-3'-phosphate
  modified_base 9: mod_base = OTHER; note = 2'-deoxy-2'-fluoroguanosine-3'-phosphate
  modified_base 10: mod_base = OTHER; note = 2'-O-methyluridine-3'-phosphate
  modified_base 11: mod_base = OTHER; note = 2'-O-methyladenosine-3'-phosphate
  modified_base 12: mod_base = OTHER; note = 2'-O-methylguanosine-3'-phosphate
  modified_base 13: mod_base = OTHER; note = 2'-O-methyladenosine-3'-phosphate
  modified_base 14: mod_base = OTHER; note = 2'-deoxy-2'-fluoroadenosine-3'-phosphate
  modified_base 15: mod_base = OTHER; note = 2'-O-methyladenosine-3'-phosphate
  modified_base 16: mod_base = OTHER; note = 2'-deoxy-2'-fluorouridine-3'-phosphate
  modified_base 17: mod_base = OTHER; note = 2'-O-methylguanosine-3'-phosphate
  modified_base 18: mod_base = OTHER; note = 2'-O-methylguanosine-3'-phosphate
  modified_base 19: mod_base = OTHER; note = 2'-O-methylcytidine-3'-phosphate
  modified_base 20: mod_base = OTHER; note = 2'-O-methyladenosine-3'-phosphate
  modified_base 21: mod_base = OTHER; note = 2'-O-methylguanosine-3'-phosphorothioate
  modified_base 22: mod_base = OTHER; note = 2'-O-methylcytidine-3'-phosphorothioate
  modified_base 23: mod_base = OTHER; note = 2'-O-methylcytidine
tacactgcgtagaaatggcagcc

SEQ ID NO: 2899 - RNA, 23 nt, synthetic construct
  source 1..23: mol_type = other RNA
  modified_base 1: mod_base = OTHER; note = 2'-O-methyluridine-3'-phosphorothioate 5'-(E)-Vinylphosphonate
  modified_base 2: mod_base = OTHER; note = 2'-deoxy-2'-fluoroadenosine-3'-phosphorothioate
  modified_base 3: mod_base = OTHER; note = 2'-O-methyladenosine-3'-phosphate
  modified_base 4: mod_base = OTHER; note = 2'-O-methylguanosine-3'-phosphate
  modified_base 5: mod_base = OTHER; note = 2'-O-methylcytidine-3'-phosphate
  modified_base 6: mod_base = OTHER; note = 2'-deoxy-2'-fluoroguanosine-3'-phosphate
  modified_base 7: mod_base = OTHER; note = 2'-O-methylguanosine-3'-phosphate
  modified_base 8: mod_base = OTHER; note = 2'-deoxy-2'-fluorouridine-3'-phosphate
  modified_base 9: mod_base = OTHER; note = 2'-deoxy-2'-fluorocytidine-3'-phosphate
  modified_base 10: mod_base = OTHER; note = 2'-O-methyladenosine-3'-phosphate
  modified_base 11: mod_base = OTHER; note = 2'-O-methyladenosine-3'-phosphate
  modified_base 12: mod_base = OTHER; note = 2'-O-methyluridine-3'-phosphate
  modified_base 13: mod_base = OTHER; note = 2'-O-methylguanosine-3'-phosphate
  modified_base 14: mod_base = OTHER; note = 2'-deoxy-2'-fluorouridine-3'-phosphate
  modified_base 15: mod_base = OTHER; note = 2'-O-methylcytidine-3'-phosphate
  modified_base 16: mod_base = OTHER; note = 2'-deoxy-2'-fluoroadenosine-3'-phosphate
  modified_base 17: mod_base = OTHER; note = 2'-O-methylcytidine-3'-phosphate
  modified_base 18: mod_base = OTHER; note = 2'-O-methyladenosine-3'-phosphate
  modified_base 19: mod_base = OTHER; note = 2'-O-methylguanosine-3'-phosphate
  modified_base 20: mod_base = OTHER; note = 2'-O-methyluridine-3'-phosphate
  modified_base 21: mod_base = OTHER; note = 2'-O-methylguanosine-3'-phosphorothioate
  modified_base 22: mod_base = OTHER; note = 2'-O-methylcytidine-3'-phosphorothioate
  modified_base 23: mod_base = OTHER; note = 2'-O-methyluridine
taagcggtcaatgtcacagtgct

SEQ ID NO: 2900 - RNA, 23 nt, synthetic construct
  source 1..23: mol_type = other RNA
  modified_base 1: mod_base = OTHER; note = 2'-O-methyluridine-3'-phosphorothioate 5'-(E)-Vinylphosphonate
  modified_base 2: mod_base = OTHER; note = 2'-deoxy-2'-fluoroadenosine-3'-phosphorothioate
  modified_base 3: mod_base = OTHER; note = 2'-O-methylguanosine-3'-phosphate
  modified_base 4: mod_base = OTHER; note = 2'-O-methyladenosine-3'-phosphate
  modified_base 5: mod_base = OTHER; note = 2'-O-methylguanosine-3'-phosphate
  modified_base 6: mod_base = OTHER; note = 2'-deoxy-2'-fluoroguanosine-3'-phosphate
  modified_base 7: mod_base = OTHER; note = 2'-O-methylguanosine-3'-phosphate
  modified_base 8: mod_base = OTHER; note = 2'-deoxy-2'-fluoroadenosine-3'-phosphate
  modified_base 9: mod_base = OTHER; note = 2'-deoxy-2'-fluorouridine-3'-phosphate
  modified_base 10: mod_base = OTHER; note = 2'-O-methylguanosine-3'-phosphate
  modified_base 11: mod_base = OTHER; note = 2'-O-methylguanosine-3'-phosphate
  modified_base 12: mod_base = OTHER; note = 2'-O-methylcytidine-3'-phosphate
  modified_base 13: mod_base = OTHER; note = 2'-O-methyladenosine-3'-phosphate
  modified_base 14: mod_base = OTHER; note = 2'-deoxy-2'-fluorouridine-3'-phosphate
  modified_base 15: mod_base = OTHER; note = 2'-O-methyluridine-3'-phosphate
  modified_base 16: mod_base = OTHER; note = 2'-deoxy-2'-fluoroguanosine-3'-phosphate
  modified_base 17: mod_base = OTHER; note = 2'-O-methyluridine-3'-phosphate
  modified_base 18: mod_base = OTHER; note = 2'-O-methylcytidine-3'-phosphate
  modified_base 19: mod_base = OTHER; note = 2'-O-methyladenosine-3'-phosphate
  modified_base 20: mod_base = OTHER; note = 2'-O-methylcytidine-3'-phosphate
  modified_base 21: mod_base = OTHER; note = 2'-O-methyladenosine-3'-phosphorothioate
  modified_base 22: mod_base = OTHER; note = 2'-O-methylguanosine-3'-phosphorothioate
  modified_base 23: mod_base = OTHER; note = 2'-O-methylcytidine
tagagggatggcattgtcacagc

SEQ ID NO: 2901 - RNA, 23 nt, synthetic construct
  source 1..23: mol_type = other RNA
  modified_base 1: mod_base = OTHER; note = 2'-O-methyluridine-3'-phosphorothioate 5'-(E)-Vinylphosphonate
  modified_base 2: mod_base = OTHER; note = 2'-deoxy-2'-fluoroadenosine-3'-phosphorothioate
  modified_base 3: mod_base = OTHER; note = 2'-O-methylcytidine-3'-phosphate
  modified_base 4: mod_base = OTHER; note = 2'-O-methylcytidine-3'-phosphate
  modified_base 5: mod_base = OTHER; note = 2'-O-methylguanosine-3'-phosphate
  modified_base 6: mod_base = OTHER; note = 2'-deoxy-2'-fluorouridine-3'-phosphate
  modified_base 7: mod_base = OTHER; note = 2'-O-methylguanosine-3'-phosphate
  modified_base 8: mod_base = OTHER; note = 2'-deoxy-2'-fluorocytidine-3'-phosphate
  modified_base 9: mod_base = OTHER; note = 2'-deoxy-2'-fluoroadenosine-3'-phosphate
  modified_base 10: mod_base = OTHER; note = 2'-O-methylguanosine-3'-phosphate
  modified_base 11: mod_base = OTHER; note = 2'-O-methyluridine-3'-phosphate
  modified_base 12: mod_base = OTHER; note = 2'-O-methyluridine-3'-phosphate
  modified_base 13: mod_base = OTHER; note = 2'-O-methylcytidine-3'-phosphate
  modified_base 14: mod_base = OTHER; note = 2'-deoxy-2'-fluorouridine-3'-phosphate
  modified_base 15: mod_base = OTHER; note = 2'-O-methylcytidine-3'-phosphate
  modified_base 16: mod_base = OTHER; note = 2'-deoxy-2'-fluorocytidine-3'-phosphate
  modified_base 17: mod_base = OTHER; note = 2'-O-methyladenosine-3'-phosphate
  modified_base 18: mod_base = OTHER; note = 2'-O-methylguanosine-3'-phosphate
  modified_base 19: mod_base = OTHER; note = 2'-O-methylguanosine-3'-phosphate
  modified_base 20: mod_base = OTHER; note = 2'-O-methylguanosine-3'-phosphate
  modified_base 21: mod_base = OTHER; note = 2'-O-methyluridine-3'-phosphorothioate
  modified_base 22: mod_base = OTHER; note = 2'-O-methylcytidine-3'-phosphorothioate
  modified_base 23: mod_base = OTHER; note = 2'-O-methylcytidine
taccgtgcagttctccagggtcc

SEQ ID NO: 2902 - RNA, 23 nt, synthetic construct
  source 1..23: mol_type = other RNA
  modified_base 1: mod_base = OTHER; note = 2'-O-methyluridine-3'-phosphorothioate 5'-(E)-Vinylphosphonate
  modified_base 2: mod_base = OTHER; note = 2'-deoxy-2'-fluoroadenosine-3'-phosphorothioate
  modified_base 3: mod_base = OTHER; note = 2'-O-methylcytidine-3'-phosphate
  modified_base 4: mod_base = OTHER; note = 2'-O-methylguanosine-3'-phosphate
  modified_base 5: mod_base = OTHER; note = 2'-O-methyladenosine-3'-phosphate
  modified_base 6: mod_base = OTHER; note = 2'-deoxy-2'-fluorocytidine-3'-phosphate
  modified_base 7: mod_base = OTHER; note = 2'-O-methyladenosine-3'-phosphate
  modified_base 8: mod_base = OTHER; note = 2'-deoxy-2'-fluorocytidine-3'-phosphate
  modified_base 9: mod_base = OTHER; note = 2'-deoxy-2'-fluoroguanosine-3'-phosphate
  modified_base 10: mod_base = OTHER; note = 2'-O-methylguanosine-3'-phosphate
  modified_base 11: mod_base = OTHER; note = 2'-O-methyluridine-3'-phosphate
  modified_base 12: mod_base = OTHER; note = 2'-O-methyluridine-3'-phosphate
  modified_base 13: mod_base = OTHER; note = 2'-O-methylguanosine-3'-phosphate
  modified_base 14: mod_base = OTHER; note = 2'-deoxy-2'-fluorouridine-3'-phosphate
  modified_base 15: mod_base = OTHER; note = 2'-O-methylcytidine-3'-phosphate
  modified_base 16: mod_base = OTHER; note = 2'-deoxy-2'-fluoroadenosine-3'-phosphate
  modified_base 17: mod_base = OTHER; note = 2'-O-methylcytidine-3'-phosphate
  modified_base 18: mod_base = OTHER; note = 2'-O-methylcytidine-3'-phosphate
  modified_base 19: mod_base = OTHER; note = 2'-O-methylcytidine-3'-phosphate
  modified_base 20: mod_base = OTHER; note = 2'-O-methyladenosine-3'-phosphate
  modified_base 21: mod_base = OTHER; note = 2'-O-methylcytidine-3'-phosphorothioate
  modified_base 22: mod_base = OTHER; note = 2'-O-methylguanosine-3'-phosphorothioate
  modified_base 23: mod_base = OTHER; note = 2'-O-methylcytidine
tacgacacggttgtcacccacgc

SEQ ID NO: 2903 - RNA, 23 nt, synthetic construct
  source 1..23: mol_type = other RNA
  modified_base 1: mod_base = OTHER; note = 2'-O-methyluridine-3'-phosphorothioate 5'-(E)-Vinylphosphonate
  modified_base 2: mod_base = OTHER; note = 2'-deoxy-2'-fluorouridine-3'-phosphorothioate
  modified_base 3: mod_base = OTHER; note = 2'-O-methyluridine-3'-phosphate
  modified_base 4: mod_base = OTHER; note = 2'-O-methylguanosine-3'-phosphate
  modified_base 5: mod_base = OTHER; note = 2'-O-methylguanosine-3'-phosphate
  modified_base 6: mod_base = OTHER; note = 2'-deoxy-2'-fluorocytidine-3'-phosphate
  modified_base 7: mod_base = OTHER; note = 2'-O-methylcytidine-3'-phosphate
  modified_base 8: mod_base = OTHER; note = 2'-deoxy-2'-fluoroadenosine-3'-phosphate
  modified_base 9: mod_base = OTHER; note = 2'-deoxy-2'-fluorocytidine-3'-phosphate
  modified_base 10: mod_base = OTHER; note = 2'-O-methyladenosine-3'-phosphate
  modified_base 11: mod_base = OTHER; note = 2'-O-methylguanosine-3'-phosphate
  modified_base 12: mod_base = OTHER; note = 2'-O-methylguanosine-3'-phosphate
  modified_base 13: mod_base = OTHER; note = 2'-O-methylcytidine-3'-phosphate
  modified_base 14: mod_base = OTHER; note = 2'-deoxy-2'-fluorouridine-3'-phosphate
  modified_base 15: mod_base = OTHER; note = 2'-O-methyluridine-3'-phosphate
  modified_base 16: mod_base = OTHER; note = 2'-deoxy-2'-fluorouridine-3'-phosphate
  modified_base 17: mod_base = OTHER; note = 2'-O-methylguanosine-3'-phosphate
  modified_base 18: mod_base = OTHER; note = 2'-O-methylguanosine-3'-phosphate
  modified_base 19: mod_base = OTHER; note = 2'-O-methylguanosine-3'-phosphate
  modified_base 20: mod_base = OTHER; note = 2'-O-methyluridine-3'-phosphate
  modified_base 21: mod_base = OTHER; note = 2'-O-methylcytidine-3'-phosphorothioate
  modified_base 22: mod_base = OTHER; note = 2'-O-methylcytidine-3'-phosphorothioate
  modified_base 23: mod_base = OTHER; note = 2'-O-methyladenosine
tttggccacaggctttgggtcca

SEQ ID NO: 2904 - RNA, 23 nt, synthetic construct
  source 1..23: mol_type = other RNA
  modified_base 1: mod_base = OTHER; note = 2'-O-methyluridine-3'-phosphorothioate 5'-(E)-Vinylphosphonate
  modified_base 2: mod_base = OTHER; note = 2'-deoxy-2'-fluoroguanosine-3'-phosphorothioate
  modified_base 3: mod_base = OTHER; note = 2'-O-methylcytidine-3'-phosphate
  modified_base 4: mod_base = OTHER; note = 2'-O-methyladenosine-3'-phosphate
  modified_base 5: mod_base = OTHER; note = 2'-O-methylguanosine-3'-phosphate
  modified_base 6: mod_base = OTHER; note = 2'-deoxy-2'-fluoroguanosine-3'-phosphate
  modified_base 7: mod_base = OTHER; note = 2'-O-methyluridine-3'-phosphate
  modified_base 8: mod_base = OTHER; note = 2'-deoxy-2'-fluoroguanosine-3'-phosphate
  modified_base 9: mod_base = OTHER; note = 2'-deoxy-2'-fluorocytidine-3'-phosphate
  modified_base 10: mod_base = OTHER; note = 2'-O-methyluridine-3'-phosphate
  modified_base 11: mod_base = OTHER; note = 2'-O-methyluridine-3'-phosphate
  modified_base 12: mod_base = OTHER; note = 2'-O-methylguanosine-3'-phosphate
  modified_base 13: mod_base = OTHER; note = 2'-O-methyluridine-3'-phosphate
  modified_base 14: mod_base = OTHER; note = 2'-deoxy-2'-fluorouridine-3'-phosphate
  modified_base 15: mod_base = OTHER; note = 2'-O-methylcytidine-3'-phosphate
  modified_base 16: mod_base = OTHER; note = 2'-deoxy-2'-fluoroadenosine-3'-phosphate
  modified_base 17: mod_base = OTHER; note = 2'-O-methylcytidine-3'-phosphate
  modified_base 18: mod_base = OTHER; note = 2'-O-methylguanosine-3'-phosphate
  modified_base 19: mod_base = OTHER; note = 2'-O-methylcytidine-3'-phosphate
  modified_base 20: mod_base = OTHER; note = 2'-O-methyladenosine-3'-phosphate
  modified_base 21: mod_base = OTHER; note = 2'-O-methylguanosine-3'-phosphorothioate
  modified_base 22: mod_base = OTHER; note = 2'-O-methylguanosine-3'-phosphorothioate
  modified_base 23: mod_base = OTHER; note = 2'-O-methyluridine
tgcaggtgcttgttcacgcaggt

SEQ ID NO: 2905 - RNA, 23 nt, synthetic construct
  source 1..23: mol_type = other RNA
  modified_base 1: mod_base = OTHER; note = 2'-O-methyluridine-3'-phosphorothioate 5'-(E)-Vinylphosphonate
  modified_base 2: mod_base = OTHER; note = 2'-deoxy-2'-fluoroguanosine-3'-phosphorothioate
  modified_base 3: mod_base = OTHER; note = 2'-O-methylcytidine-3'-phosphate
  modified_base 4: mod_base = OTHER; note = 2'-O-methyluridine-3'-phosphate
  modified_base 5: mod_base = OTHER; note = 2'-O-methylcytidine-3'-phosphate
  modified_base 6: mod_base = OTHER; note = 2'-deoxy-2'-fluoroguanosine-3'-phosphate
  modified_base 7: mod_base = OTHER; note = 2'-O-methylguanosine-3'-phosphate
  modified_base 8: mod_base = OTHER; note = 2'-deoxy-2'-fluoroguanosine-3'-phosphate
  modified_base 9: mod_base = OTHER; note = 2'-deoxy-2'-fluorouridine-3'-phosphate
  modified_base 10: mod_base = OTHER; note = 2'-O-methylcytidine-3'-phosphate
  modified_base 11: mod_base = OTHER; note = 2'-O-methylcytidine-3'-phosphate
  modified_base 12: mod_base = OTHER; note = 2'-O-methylguanosine-3'-phosphate
  modified_base 13: mod_base = OTHER; note = 2'-O-methyladenosine-3'-phosphate
  modified_base 14: mod_base = OTHER; note = 2'-deoxy-2'-fluorocytidine-3'-phosphate
  modified_base 15: mod_base = OTHER; note = 2'-O-methyladenosine-3'-phosphate
  modified_base 16: mod_base = OTHER; note = 2'-deoxy-2'-fluorocytidine-3'-phosphate
  modified_base 17: mod_base = OTHER; note = 2'-O-methyluridine-3'-phosphate
  modified_base 18: mod_base = OTHER; note = 2'-O-methyluridine-3'-phosphate
  modified_base 19: mod_base = OTHER; note = 2'-O-methyluridine-3'-phosphate
  modified_base 20: mod_base = OTHER; note = 2'-O-methylguanosine-3'-phosphate
  modified_base 21: mod_base = OTHER; note = 2'-O-methyladenosine-3'-phosphorothioate
  modified_base 22: mod_base = OTHER; note = 2'-O-methyluridine-3'-phosphorothioate
  modified_base 23: mod_base = OTHER; note = 2'-O-methylguanosine
tgctcgggtccgacactttgatg

SEQ ID NO: 2906 - RNA, 23 nt, synthetic construct
  source 1..23: mol_type = other RNA
  modified_base 1: mod_base = OTHER; note = 2'-O-methyluridine-3'-phosphorothioate 5'-(E)-Vinylphosphonate
  modified_base 2: mod_base = OTHER; note = 2'-deoxy-2'-fluorocytidine-3'-phosphorothioate
  modified_base 3: mod_base = OTHER; note = 2'-O-methyluridine-3'-phosphate
  modified_base 4: mod_base = OTHER; note = 2'-O-methylcytidine-3'-phosphate
  modified_base 5: mod_base = OTHER; note = 2'-O-methyladenosine-3'-phosphate
  modified_base 6: mod_base = OTHER; note = 2'-deoxy-2'-fluorouridine-3'-phosphate
  modified_base 7: mod_base = OTHER; note = 2'-O-methyladenosine-3'-phosphate
  modified_base 8: mod_base = OTHER; note = 2'-deoxy-2'-fluoroguanosine-3'-phosphate
  modified_base 9: mod_base = OTHER; note = 2'-deoxy-2'-fluorouridine-3'-phosphate
  modified_base 10: mod_base = OTHER; note = 2'-O-methylguanosine-3'-phosphate
  modified_base 11: mod_base = OTHER; note = 2'-O-methylguanosine-3'-phosphate
  modified_base 12: mod_base = OTHER; note = 2'-O-methyladenosine-3'-phosphate
  modified_base 13: mod_base = OTHER; note = 2'-O-methyladenosine-3'-phosphate
  modified_base 14: mod_base = OTHER; note = 2'-deoxy-2'-fluoroguanosine-3'-phosphate
  modified_base 15: mod_base = OTHER; note = 2'-O-methyluridine-3'-phosphate
  modified_base 16: mod_base = OTHER; note = 2'-deoxy-2'-fluorocytidine-3'-phosphate
  modified_base 17: mod_base = OTHER; note = 2'-O-methyladenosine-3'-phosphate
  modified_base 18: mod_base = OTHER; note = 2'-O-methylcytidine-3'-phosphate
  modified_base 19: mod_base = OTHER; note = 2'-O-methyladenosine-3'-phosphate
  modified_base 20: mod_base = OTHER; note = 2'-O-methylguanosine-3'-phosphate
  modified_base 21: mod_base = OTHER; note = 2'-O-methylguanosine-3'-phosphorothioate
  modified_base 22: mod_base = OTHER; note = 2'-O-methylguanosine-3'-phosphorothioate
  modified_base 23: mod_base = OTHER; note = 2'-O-methylcytidine
tctcatagtggaagtcacagggc

SEQ ID NO: 2907 - RNA, 23 nt, synthetic construct
  source 1..23: mol_type = other RNA
  modified_base 1: mod_base = OTHER; note = 2'-O-methyluridine-3'-phosphorothioate 5'-(E)-Vinylphosphonate
  modified_base 2: mod_base = OTHER; note = 2'-deoxy-2'-fluorocytidine-3'-phosphorothioate
  modified_base 3: mod_base = OTHER; note = 2'-O-methyladenosine-3'-phosphate
  modified_base 4: mod_base = OTHER; note = 2'-O-methylcytidine-3'-phosphate
  modified_base 5: mod_base = OTHER; note = 2'-O-methyladenosine-3'-phosphate
  modified_base 6: mod_base = OTHER; note = 2'-deoxy-2'-fluorouridine-3'-phosphate
  modified_base 7: mod_base = OTHER; note = 2'-O-methylguanosine-3'-phosphate
  modified_base 8: mod_base = OTHER; note = 2'-deoxy-2'-fluorocytidine-3'-phosphate
  modified_base 9: mod_base = OTHER; note = 2'-deoxy-2'-fluorouridine-3'-phosphate
  modified_base 10: mod_base = OTHER; note = 2'-O-methylguanosine-3'-phosphate
  modified_base 11: mod_base = OTHER; note = 2'-O-methylcytidine-3'-phosphate
  modified_base 12: mod_base = OTHER; note = 2'-O-methyladenosine-3'-phosphate
  modified_base 13: mod_base = OTHER; note = 2'-O-methylguanosine-3'-phosphate
  modified_base 14: mod_base = OTHER; note = 2'-deoxy-2'-fluoroadenosine-3'-phosphate
  modified_base 15: mod_base = OTHER; note = 2'-O-methyluridine-3'-phosphate
  modified_base 16: mod_base = OTHER; note = 2'-deoxy-2'-fluoroguanosine-3'-phosphate
  modified_base 17: mod_base = OTHER; note = 2'-O-methylcytidine-3'-phosphate
  modified_base 18: mod_base = OTHER; note = 2'-O-methyladenosine-3'-phosphate
  modified_base 19: mod_base = OTHER; note = 2'-O-methylcytidine-3'-phosphate
  modified_base 20: mod_base = OTHER; note = 2'-O-methyluridine-3'-phosphate
  modified_base 21: mod_base = OTHER; note = 2'-O-methylcytidine-3'-phosphorothioate
  modified_base 22: mod_base = OTHER; note = 2'-O-methylguanosine-3'-phosphorothioate
  modified_base 23: mod_base = OTHER; note = 2'-O-methylcytidine
tcacatgctgcagatgcactcgc

SEQ ID NO: 2908 - RNA, 23 nt, synthetic construct
  source 1..23: mol_type = other RNA
  modified_base 1: mod_base = OTHER; note = 2'-O-methyluridine-3'-phosphorothioate 5'-(E)-Vinylphosphonate
  modified_base 2: mod_base = OTHER; note = 2'-deoxy-2'-fluoroguanosine-3'-phosphorothioate
  modified_base 3: mod_base = OTHER; note = 2'-O-methyluridine-3'-phosphate
  modified_base 4: mod_base = OTHER; note = 2'-O-methylcytidine-3'-phosphate
  modified_base 5: mod_base = OTHER; note = 2'-O-methyladenosine-3'-phosphate
  modified_base 6: mod_base = OTHER; note = 2'-deoxy-2'-fluoroadenosine-3'-phosphate
  modified_base 7: mod_base = OTHER; note = 2'-O-methyladenosine-3'-phosphate
  modified_base 8: mod_base = OTHER; note = 2'-deoxy-2'-fluoroguanosine-3'-phosphate
  modified_base 9: mod_base = OTHER; note = 2'-deoxy-2'-fluoroguanosine-3'-phosphate
  modified_base 10: mod_base = OTHER; note = 2'-O-methyluridine-3'-phosphate
  modified_base 11: mod_base = OTHER; note = 2'-O-methylguanosine-3'-phosphate
  modified_base 12: mod_base = OTHER; note = 2'-O-methylguanosine-3'-phosphate
  modified_base 13: mod_base = OTHER; note = 2'-O-methyladenosine-3'-phosphate
  modified_base 14: mod_base = OTHER; note = 2'-deoxy-2'-fluoroadenosine-3'-phosphate
  modified_base 15: mod_base = OTHER; note = 2'-O-methyluridine-3'-phosphate
  modified_base 16: mod_base = OTHER; note = 2'-deoxy-2'-fluoroadenosine-3'-phosphate
  modified_base 17: mod_base = OTHER; note = 2'-O-methylguanosine-3'-phosphate
  modified_base 18: mod_base = OTHER; note = 2'-O-methyluridine-3'-phosphate
  modified_base 19: mod_base = OTHER; note = 2'-O-methylguanosine-3'-phosphate
  modified_base 20: mod_base = OTHER; note = 2'-O-methylguanosine-3'-phosphate
  modified_base 21: mod_base = OTHER; note = 2'-O-methylguanosine-3'-phosphorothioate
  modified_base 22: mod_base = OTHER; note = 2'-O-methyladenosine-3'-phosphorothioate
  modified_base 23: mod_base = OTHER; note = 2'-O-methylguanosine
tgtcaaaggtggaatagtgggag

SEQ ID NO: 2909 - RNA, 23 nt, synthetic construct
  source 1..23: mol_type = other RNA
  modified_base 1: mod_base = OTHER; note = 2'-O-methyluridine-3'-phosphorothioate 5'-(E)-Vinylphosphonate
  modified_base 2: mod_base = OTHER; note = 2'-deoxy-2'-fluorouridine-3'-phosphorothioate
  modified_base 3: mod_base = OTHER; note = 2'-O-methylcytidine-3'-phosphate
  modified_base 4: mod_base = OTHER; note = 2'-O-methyluridine-3'-phosphate
  modified_base 5: mod_base = OTHER; note = 2'-O-methylcytidine-3'-phosphate
  modified_base 6: mod_base = OTHER; note = 2'-deoxy-2'-fluorouridine-3'-phosphate
  modified_base 7: mod_base = OTHER; note = 2'-O-methylcytidine-3'-phosphate
  modified_base 8: mod_base = OTHER; note = 2'-deoxy-2'-fluoroadenosine-3'-phosphate
  modified_base 9: mod_base = OTHER; note = 2'-deoxy-2'-fluorouridine-3'-phosphate
  modified_base 10: mod_base = OTHER; note = 2'-O-methylguanosine-3'-phosphate
  modified_base 11: mod_base = OTHER; note = 2'-O-methyladenosine-3'-phosphate
  modified_base 12: mod_base = OTHER; note = 2'-O-methylguanosine-3'-phosphate
  modified_base 13: mod_base = OTHER; note = 2'-O-methylguanosine-3'-phosphate
  modified_base 14: mod_base = OTHER; note = 2'-deoxy-2'-fluoroadenosine-3'-phosphate
  modified_base 15: mod_base = OTHER; note = 2'-O-methylcytidine-3'-phosphate
  modified_base 16: mod_base = OTHER; note = 2'-deoxy-2'-fluoroadenosine-3'-phosphate
  modified_base 17: mod_base = OTHER; note = 2'-O-methyluridine-3'-phosphate
  modified_base 18: mod_base = OTHER; note = 2'-O-methyladenosine-3'-phosphate
  modified_base 19: mod_base = OTHER; note = 2'-O-methylguanosine-3'-phosphate
  modified_base 20: mod_base = OTHER; note = 2'-O-methylguanosine-3'-phosphate
  modified_base 21: mod_base = OTHER; note = 2'-O-methyluridine-3'-phosphorothioate
  modified_base 22: mod_base = OTHER; note = 2'-O-methylguanosine-3'-phosphorothioate
  modified_base 23: mod_base = OTHER; note = 2'-O-methylcytidine
ttctctcatgaggacataggtgc

SEQ ID NO: 2910 - RNA, 23 nt, synthetic construct
  source 1..23: mol_type = other RNA
  modified_base 1: mod_base = OTHER; note = 2'-O-methyluridine-3'-phosphorothioate 5'-(E)-Vinylphosphonate
  modified_base 2: mod_base = OTHER; note = 2'-deoxy-2'-fluoroguanosine-3'-phosphorothioate
  modified_base 3: mod_base = OTHER; note = 2'-O-methylcytidine-3'-phosphate
  modified_base 4: mod_base = OTHER; note = 2'-O-methyluridine-3'-phosphate
  modified_base 5: mod_base = OTHER; note = 2'-O-methylguanosine-3'-phosphate
  modified_base 6: mod_base = OTHER; note = 2'-deoxy-2'-fluoroadenosine-3'-phosphate
  modified_base 7: mod_base = OTHER; note = 2'-O-methylguanosine-3'-phosphate
  modified_base 8: mod_base = OTHER; note = 2'-deoxy-2'-fluoroadenosine-3'-phosphate
  modified_base 9: mod_base = OTHER; note = 2'-deoxy-2'-fluorouridine-3'-phosphate
  modified_base 10: mod_base = OTHER; note = 2'-O-methyluridine-3'-phosphate
  modified_base 11: mod_base = OTHER; note = 2'-O-methylcytidine-3'-phosphate
  modified_base 12: mod_base = OTHER; note = 2'-O-methylcytidine-3'-phosphate
  modified_base 13: mod_base = OTHER; note = 2'-O-methylcytidine-3'-phosphate
  modified_base 14: mod_base = OTHER; note = 2'-deoxy-2'-fluoroadenosine-3'-phosphate
  modified_base 15: mod_base = OTHER; note = 2'-O-methyladenosine-3'-phosphate
  modified_base 16: mod_base = OTHER; note = 2'-deoxy-2'-fluoroadenosine-3'-phosphate
  modified_base 17: mod_base = OTHER; note = 2'-O-methylguanosine-3'-phosphate
  modified_base 18: mod_base = OTHER; note = 2'-O-methylcytidine-3'-phosphate
  modified_base 19: mod_base = OTHER; note = 2'-O-methylguanosine-3'-phosphate
  modified_base 20: mod_base = OTHER; note = 2'-O-methyluridine-3'-phosphate
  modified_base 21: mod_base = OTHER; note = 2'-O-methylguanosine-3'-phosphorothioate
  modified_base 22: mod_base = OTHER; note = 2'-O-methylcytidine-3'-phosphorothioate
  modified_base 23: mod_base = OTHER; note = 2'-O-methyladenosine
tgctgagattcccaaagcgtgca

SEQ ID NO: 2911 - RNA, 23 nt, synthetic construct
  source 1..23: mol_type = other RNA
  modified_base 1: mod_base = OTHER; note = 2'-O-methyluridine-3'-phosphorothioate 5'-(E)-Vinylphosphonate
  modified_base 2: mod_base = OTHER; note = 2'-deoxy-2'-fluoroguanosine-3'-phosphorothioate
  modified_base 3: mod_base = OTHER; note = 2'-O-methyluridine-3'-phosphate
  modified_base 4: mod_base = OTHER; note = 2'-O-methylguanosine-3'-phosphate
  modified_base 5: mod_base = OTHER; note = 2'-O-methylcytidine-3'-phosphate
  modified_base 6: mod_base = OTHER; note = 2'-deoxy-2'-fluoroadenosine-3'-phosphate
  modified_base 7: mod_base = OTHER; note = 2'-O-methylguanosine-3'-phosphate
  modified_base 8: mod_base = OTHER; note = 2'-deoxy-2'-fluorouridine-3'-phosphate
  modified_base 9: mod_base = OTHER; note = 2'-deoxy-2'-fluoroadenosine-3'-phosphate
  modified_base 10: mod_base = OTHER; note = 2'-O-methylguanosine-3'-phosphate
  modified_base 11: mod_base = OTHER; note = 2'-O-methyluridine-3'-phosphate
  modified_base 12: mod_base = OTHER; note = 2'-O-methylguanosine-3'-phosphate
  modified_base 13: mod_base = OTHER; note = 2'-O-methylguanosine-3'-phosphate
  modified_base 14: mod_base = OTHER; note = 2'-deoxy-2'-fluorouridine-3'-phosphate
  modified_base 15: mod_base = OTHER; note = 2'-O-methyluridine-3'-phosphate
  modified_base 16: mod_base = OTHER; note = 2'-deoxy-2'-fluoroguanosine-3'-phosphate
  modified_base 17: mod_base = OTHER; note = 2'-O-methyluridine-3'-phosphate
  modified_base 18: mod_base = OTHER; note = 2'-O-methylcytidine-3'-phosphate
  modified_base 19: mod_base = OTHER; note = 2'-O-methylcytidine-3'-phosphate
  modified_base 20: mod_base = OTHER; note = 2'-O-methyladenosine-3'-phosphate
  modified_base 21: mod_base = OTHER; note = 2'-O-methylguanosine-3'-phosphorothioate
  modified_base 22: mod_base = OTHER; note = 2'-O-methylguanosine-3'-phosphorothioate
  modified_base 23: mod_base = OTHER; note = 2'-O-methyluridine
tgtgcagtagtggttgtccaggt

SEQ ID NO: 2912 - RNA, 23 nt, synthetic construct
  source 1..23: mol_type = other RNA
  modified_base 1: mod_base = OTHER; note = 2'-O-methyluridine-3'-phosphorothioate 5'-(E)-Vinylphosphonate
  modified_base 2: mod_base = OTHER; note = 2'-deoxy-2'-fluoroguanosine-3'-phosphorothioate
  modified_base 3: mod_base = OTHER; note = 2'-O-methyladenosine-3'-phosphate
  modified_base 4: mod_base = OTHER; note = 2'-O-methylcytidine-3'-phosphate
  modified_base 5: mod_base = OTHER; note = 2'-O-methyluridine-3'-phosphate
  modified_base 6: mod_base = OTHER; note = 2'-deoxy-2'-fluorouridine-3'-phosphate
  modified_base 7: mod_base = OTHER; note = 2'-O-methylguanosine-3'-phosphate
  modified_base 8: mod_base = OTHER; note = 2'-deoxy-2'-fluorouridine-3'-phosphate
  modified_base 9: mod_base = OTHER; note = 2'-deoxy-2'-fluoroadenosine-3'-phosphate
  modified_base 10: mod_base = OTHER; note = 2'-O-methylguanosine-3'-phosphate
  modified_base 11: mod_base = OTHER; note = 2'-O-methyluridine-3'-phosphate
  modified_base 12: mod_base = OTHER; note = 2'-O-methylguanosine-3'-phosphate
  modified_base 13: mod_base = OTHER; note = 2'-O-methylguanosine-3'-phosphate
  modified_base 14: mod_base = OTHER; note = 2'-deoxy-2'-fluoroadenosine-3'-phosphate
  modified_base 15: mod_base = OTHER; note = 2'-O-methyluridine-3'-phosphate
  modified_base 16: mod_base = OTHER; note = 2'-deoxy-2'-fluoroguanosine-3'-phosphate
  modified_base 17: mod_base = OTHER; note = 2'-O-methylcytidine-3'-phosphate
  modified_base 18: mod_base = OTHER; note = 2'-O-methyluridine-3'-phosphate
  modified_base 19: mod_base = OTHER; note = 2'-O-methylguanosine-3'-phosphate
  modified_base 20: mod_base = OTHER; note = 2'-O-methyladenosine-3'-phosphate
  modified_base 21: mod_base = OTHER; note = 2'-O-methylguanosine-3'-phosphorothioate
  modified_base 22: mod_base = OTHER; note = 2'-O-methylguanosine-3'-phosphorothioate
  modified_base 23: mod_base = OTHER; note = 2'-O-methylguanosine
tgacttgtagtggatgctgaggg

SEQ ID NO: 2913 - RNA, 23 nt, synthetic construct
  source 1..23: mol_type = other RNA
  modified_base 1: mod_base = OTHER; note = 2'-O-methyluridine-3'-phosphorothioate 5'-(E)-Vinylphosphonate
  modified_base 2: mod_base = OTHER; note = 2'-deoxy-2'-fluoroadenosine-3'-phosphorothioate
  modified_base 3: mod_base = OTHER; note = 2'-O-methylcytidine-3'-phosphate
  modified_base 4: mod_base = OTHER; note = 2'-O-methylcytidine-3'-phosphate
  modified_base 5: mod_base = OTHER; note = 2'-O-methyladenosine-3'-phosphate
  modified_base 6: mod_base = OTHER; note = 2'-deoxy-2'-fluorouridine-3'-phosphate
  modified_base 7: mod_base = OTHER; note = 2'-O-methylguanosine-3'-phosphate
  modified_base 8: mod_base = OTHER; note = 2'-deoxy-2'-fluoroguanosine-3'-phosphate
  modified_base 9: mod_base = OTHER; note = 2'-deoxy-2'-fluorouridine-3'-phosphate
  modified_base 10: mod_base = OTHER; note = 2'-O-methylguanosine-3'-phosphate
  modified_base 11: mod_base = OTHER; note = 2'-O-methyladenosine-3'-phosphate
  modified_base 12: mod_base = OTHER; note = 2'-O-methylcytidine-3'-phosphate
  modified_base 13: mod_base = OTHER; note = 2'-O-methyladenosine-3'-phosphate
  modified_base 14: mod_base = OTHER; note = 2'-deoxy-2'-fluoroguanosine-3'-phosphate
  modified_base 15: mod_base = OTHER; note = 2'-O-methyluridine-3'-phosphate
  modified_base 16: mod_base = OTHER; note = 2'-deoxy-2'-fluoroguanosine-3'-phosphate
  modified_base 17: mod_base = OTHER; note = 2'-O-methyladenosine-3'-phosphate
  modified_base 18: mod_base = OTHER; note = 2'-O-methylguanosine-3'-phosphate
  modified_base 19: mod_base = OTHER; note = 2'-O-methylguanosine-3'-phosphate
  modified_base 20: mod_base = OTHER; note = 2'-O-methyladenosine-3'-phosphate
  modified_base 21: mod_base = OTHER; note = 2'-O-methylcytidine-3'-phosphorothioate
  modified_base 22: mod_base = OTHER; note = 2'-O-methylguanosine-3'-phosphorothioate
  modified_base 23: mod_base = OTHER; note = 2'-O-methyladenosine
taccatggtgacagtgaggacga

SEQ ID NO: 2914 - RNA, 23 nt, synthetic construct
  source 1..23: mol_type = other RNA
  modified_base 1: mod_base = OTHER; note = 2'-O-methyluridine-3'-phosphorothioate 5'-(E)-Vinylphosphonate
  modified_base 2: mod_base = OTHER; note = 2'-deoxy-2'-fluorouridine-3'-phosphorothioate
  modified_base 3: mod_base = OTHER; note = 2'-O-methyluridine-3'-phosphate
  modified_base 4: mod_base = OTHER; note = 2'-O-methyluridine-3'-phosphate
  modified_base 5: mod_base = OTHER; note = 2'-O-methylguanosine-3'-phosphate
  modified_base 6: mod_base = OTHER; note = 2'-deoxy-2'-fluoroguanosine-3'-phosphate
  modified_base 7: mod_base = OTHER; note = 2'-O-methyluridine-3'-phosphate
  modified_base 8: mod_base = OTHER; note = 2'-deoxy-2'-fluorocytidine-3'-phosphate
  modified_base 9: mod_base = OTHER; note = 2'-deoxy-2'-fluoroadenosine-3'-phosphate
  modified_base 10: mod_base = OTHER; note = 2'-O-methyladenosine-3'-phosphate
  modified_base 11: mod_base = OTHER; note = 2'-O-methyladenosine-3'-phosphate
  modified_base 12: mod_base = OTHER; note = 2'-O-methylcytidine-3'-phosphate
  modified_base 13: mod_base = OTHER; note = 2'-O-methyladenosine-3'-phosphate
  modified_base 14: mod_base = OTHER; note = 2'-deoxy-2'-fluoroguanosine-3'-phosphate
  modified_base 15: mod_base = OTHER; note = 2'-O-methylguanosine-3'-phosphate
  modified_base 16: mod_base = OTHER; note = 2'-deoxy-2'-fluoroadenosine-3'-phosphate
  modified_base 17: mod_base = OTHER; note = 2'-O-methyluridine-3'-phosphate
  modified_base 18: mod_base = OTHER; note = 2'-O-methylcytidine-3'-phosphate
  modified_base 19: mod_base = OTHER; note = 2'-O-methyladenosine-3'-phosphate
  modified_base 20: mod_base = OTHER; note = 2'-O-methylguanosine-3'-phosphate
  modified_base 21: mod_base = OTHER; note = 2'-O-methylguanosine-3'-phosphorothioate
  modified_base 22: mod_base = OTHER; note = 2'-O-methylcytidine-3'-phosphorothioate
  modified_base 23: mod_base = OTHER; note = 2'-O-methylcytidine
ttttggtcaaacaggatcaggcc

SEQ ID NO: 2915 - RNA, 23 nt, synthetic construct
  source 1..23: mol_type = other RNA
  modified_base 1: mod_base = OTHER; note = 2'-O-methyluridine-3'-phosphorothioate 5'-(E)-Vinylphosphonate
  modified_base 2: mod_base = OTHER; note = 2'-deoxy-2'-fluorocytidine-3'-phosphorothioate
  modified_base 3: mod_base = OTHER; note = 2'-O-methylcytidine-3'-phosphate
  modified_base 4: mod_base = OTHER; note = 2'-O-methylguanosine-3'-phosphate
  modified_base 5: mod_base = OTHER; note = 2'-O-methyluridine-3'-phosphate
  modified_base 6: mod_base = OTHER; note = 2'-deoxy-2'-fluorouridine-3'-phosphate
  modified_base 7: mod_base = OTHER; note = 2'-O-methylcytidine-3'-phosphate
  modified_base 8: mod_base = OTHER; note = 2'-deoxy-2'-fluorouridine-3'-phosphate
  modified_base 9: mod_base = OTHER; note = 2'-deoxy-2'-fluorouridine-3'-phosphate
  modified_base 10: mod_base = OTHER; note = 2'-O-methylguanosine-3'-phosphate
  modified_base 11: mod_base = OTHER; note = 2'-O-methylcytidine-3'-phosphate
  modified_base 12: mod_base = OTHER; note = 2'-O-methyluridine-3'-phosphate
  modified_base 13: mod_base = OTHER; note = 2'-O-methylguanosine-3'-phosphate
  modified_base 14: mod_base = OTHER; note = 2'-deoxy-2'-fluoroadenosine-3'-phosphate
  modified_base 15: mod_base = OTHER; note = 2'-O-methyladenosine-3'-phosphate
  modified_base 16: mod_base = OTHER; note = 2'-deoxy-2'-fluoroadenosine-3'-phosphate
  modified_base 17: mod_base = OTHER; note = 2'-O-methylcytidine-3'-phosphate
  modified_base 18: mod_base = OTHER; note = 2'-O-methylcytidine-3'-phosphate
  modified_base 19: mod_base = OTHER; note = 2'-O-methylguanosine-3'-phosphate
  modified_base 20: mod_base = OTHER; note = 2'-O-methylcytidine-3'-phosphate
  modified_base 21: mod_base = OTHER; note = 2'-O-methyluridine-3'-phosphorothioate
  modified_base 22: mod_base = OTHER; note = 2'-O-methylguanosine-3'-phosphorothioate
  modified_base 23: mod_base = OTHER; note = 2'-O-methylcytidine
tccgttcttgctgaaaccgctgc

SEQ ID NO: 2916 - RNA, 23 nt, synthetic construct
  source 1..23: mol_type = other RNA
  modified_base 1: mod_base = OTHER; note = 2'-O-methyluridine-3'-phosphorothioate 5'-(E)-Vinylphosphonate
  modified_base 2: mod_base = OTHER; note = 2'-deoxy-2'-fluoroadenosine-3'-phosphorothioate
  modified_base 3: mod_base = OTHER; note = 2'-O-methylguanosine-3'-phosphate
  modified_base 4: mod_base = OTHER; note = 2'-O-methylguanosine-3'-phosphate
  modified_base 5: mod_base = OTHER; note = 2'-O-methylguanosine-3'-phosphate
  modified_base 6: mod_base = OTHER; note = 2'-deoxy-2'-fluorocytidine-3'-phosphate
  modified_base 7: mod_base = OTHER; note = 2'-O-methyladenosine-3'-phosphate
  modified_base 8: mod_base = OTHER; note = 2'-deoxy-2'-fluoroguanosine-3'-phosphate
  modified_base 9: mod_base = OTHER; note = 2'-deoxy-2'-fluoroguanosine-3'-phosphate
  modified_base 10: mod_base = OTHER; note = 2'-O-methyladenosine-3'-phosphate
  modified_base 11: mod_base = OTHER; note = 2'-O-methyladenosine-3'-phosphate
  modified_base 12: mod_base = OTHER; note = 2'-O-methyluridine-3'-phosphate
  modified_base 13: mod_base = OTHER; note = 2'-O-methylguanosine-3'-phosphate
  modified_base 14: mod_base = OTHER; note = 2'-deoxy-2'-fluorouridine-3'-phosphate
  modified_base 15: mod_base = OTHER; note = 2'-O-methylcytidine-3'-phosphate
  modified_base 16: mod_base = OTHER; note = 2'-deoxy-2'-fluorocytidine-3'-phosphate
  modified_base 17: mod_base = OTHER; note = 2'-O-methyladenosine-3'-phosphate
  modified_base 18: mod_base = OTHER; note = 2'-O-methylcytidine-3'-phosphate
  modified_base 19: mod_base = OTHER; note = 2'-O-methyladenosine-3'-phosphate
  modified_base 20: mod_base = OTHER; note = 2'-O-methylcytidine-3'-phosphate
  modified_base 21: mod_base = OTHER; note = 2'-O-methylguanosine-3'-phosphorothioate
  modified_base 22: mod_base = OTHER; note = 2'-O-methylcytidine-3'-phosphorothioate
  modified_base 23: mod_base = OTHER; note = 2'-O-methyladenosine
tagggcaggaatgtccacacgca

SEQ ID NO: 2917 - RNA, 23 nt, synthetic construct
  source 1..23: mol_type = other RNA
  modified_base 1: mod_base = OTHER; note = 2'-O-methyluridine-3'-phosphorothioate 5'-(E)-Vinylphosphonate
  modified_base 2: mod_base = OTHER; note = 2'-deoxy-2'-fluorocytidine-3'-phosphorothioate
  modified_base 3: mod_base = OTHER; note = 2'-O-methylcytidine-3'-phosphate
  modified_base 4: mod_base = OTHER; note = 2'-O-methyladenosine-3'-phosphate
  modified_base 5: mod_base = OTHER; note = 2'-O-methyluridine-3'-phosphate
  modified_base 6: mod_base = OTHER; note = 2'-deoxy-2'-fluorouridine-3'-phosphate
  modified_base 7: mod_base = OTHER; note = 2'-O-methylguanosine-3'-phosphate
  modified_base 8: mod_base = OTHER; note = 2'-deoxy-2'-fluoroadenosine-3'-phosphate
  modified_base 9: mod_base = OTHER; note = 2'-deoxy-2'-fluoroadenosine-3'-phosphate
  modified_base 10: mod_base = OTHER; note = 2'-O-methylguanosine-3'-phosphate
  modified_base 11: mod_base = OTHER; note = 2'-O-methylguanosine-3'-phosphate
  modified_base 12: mod_base = OTHER; note = 2'-O-methyluridine-3'-phosphate
  modified_base 13: mod_base = OTHER; note = 2'-O-methylguanosine-3'-phosphate
  modified_base 14: mod_base = OTHER; note = 2'-deoxy-2'-fluoroadenosine-3'-phosphate
  modified_base 15: mod_base = OTHER; note = 2'-O-methylcytidine-3'-phosphate
  modified_base 16: mod_base = OTHER; note = 2'-deoxy-2'-fluoroguanosine-3'-phosphate
  modified_base 17: mod_base = OTHER; note = 2'-O-methylcytidine-3'-phosphate
  modified_base 18: mod_base = OTHER; note = 2'-O-methyluridine-3'-phosphate
  modified_base 19: mod_base = OTHER; note = 2'-O-methylcytidine-3'-phosphate
  modified_base 20: mod_base = OTHER; note = 2'-O-methyladenosine-3'-phosphate
  modified_base 21: mod_base = OTHER; note = 2'-O-methylcytidine-3'-phosphorothioate
  modified_base 22: mod_base = OTHER; note = 2'-O-methylguanosine-3'-phosphorothioate
  modified_base 23: mod_base = OTHER; note = 2'-O-methylcytidine
tccattgaaggtgacgctcacgc

SEQ ID NO: 2918 - RNA, 23 nt, synthetic construct
  source 1..23: mol_type = other RNA
  modified_base 1: mod_base = OTHER; note = 2'-O-methyluridine-3'-phosphorothioate 5'-(E)-Vinylphosphonate
  modified_base 2: mod_base = OTHER; note = 2'-deoxy-2'-fluoroguanosine-3'-phosphorothioate
  modified_base 3: mod_base = OTHER; note = 2'-O-methyluridine-3'-phosphate
  modified_base 4: mod_base = OTHER; note = 2'-O-methylguanosine-3'-phosphate
  modified_base 5: mod_base = OTHER; note = 2'-O-methyluridine-3'-phosphate
  modified_base 6: mod_base = OTHER; note = 2'-deoxy-2'-fluorouridine-3'-phosphate
  modified_base 7: mod_base = OTHER; note = 2'-O-methylguanosine-3'-phosphate
  modified_base 8: mod_base = OTHER; note = 2'-deoxy-2'-fluorouridine-3'-phosphate
  modified_base 9: mod_base = OTHER; note = 2'-deoxy-2'-fluorouridine-3'-phosphate
  modified_base 10: mod_base = OTHER; note = 2'-O-methylguanosine-3'-phosphate
  modified_base 11: mod_base = OTHER; note = 2'-O-methyluridine-3'-phosphate
  modified_base 12: mod_base = OTHER; note = 2'-O-methylguanosine-3'-phosphate
  modified_base 13: mod_base = OTHER; note = 2'-O-methylguanosine-3'-phosphate
  modified_base 14: mod_base = OTHER; note = 2'-deoxy-2'-fluoroadenosine-3'-phosphate
  modified_base 15: mod_base = OTHER; note = 2'-O-methyladenosine-3'-phosphate
  modified_base 16: mod_base = OTHER; note = 2'-deoxy-2'-fluoroguanosine-3'-phosphate
  modified_base 17: mod_base = OTHER; note = 2'-O-methyladenosine-3'-phosphate
  modified_base 18: mod_base = OTHER; note = 2'-O-methylguanosine-3'-phosphate
  modified_base 19: mod_base = OTHER; note = 2'-O-methylguanosine-3'-phosphate
  modified_base 20: mod_base = OTHER; note = 2'-O-methylcytidine-3'-phosphate
  modified_base 21: mod_base = OTHER; note = 2'-O-methyluridine-3'-phosphorothioate
  modified_base 22: mod_base = OTHER; note = 2'-O-methylguanosine-3'-phosphorothioate
  modified_base 23: mod_base = OTHER; note = 2'-O-methyluridine
tgtgttgttgtggaagaggctgt

SEQ ID NO: 2919 - RNA, 23 nt, synthetic construct
  source 1..23: mol_type = other RNA
  modified_base 1: mod_base = OTHER; note = 2'-O-methyluridine-3'-phosphorothioate 5'-(E)-Vinylphosphonate
  modified_base 2: mod_base = OTHER; note = 2'-deoxy-2'-fluorouridine-3'-phosphorothioate
  modified_base 3: mod_base = OTHER; note = 2'-O-methylcytidine-3'-phosphate
  modified_base 4: mod_base = OTHER; note = 2'-O-methylcytidine-3'-phosphate
  modified_base 5: mod_base = OTHER; note = 2'-O-methylcytidine-3'-phosphate
  modified_base 6: mod_base = OTHER; note = 2'-deoxy-2'-fluorouridine-3'-phosphate
  modified_base 7: mod_base = OTHER; note = 2'-O-methylcytidine-3'-phosphate
  modified_base 8: mod_base = OTHER; note = 2'-deoxy-2'-fluorouridine-3'-phosphate
  modified_base 9: mod_base = OTHER; note = 2'-deoxy-2'-fluoroguanosine-3'-phosphate
  modified_base 10: mod_base = OTHER; note = 2'-O-methylguanosine-3'-phosphate
  modified_base 11: mod_base = OTHER; note = 2'-O-methyluridine-3'-phosphate
  modified_base 12: mod_base = OTHER; note = 2'-O-methyluridine-3'-phosphate
  modified_base 13: mod_base = OTHER; note = 2'-O-methylguanosine-3'-phosphate
  modified_base 14: mod_base = OTHER; note = 2'-deoxy-2'-fluorouridine-3'-phosphate
  modified_base 15: mod_base = OTHER; note = 2'-O-methyluridine-3'-phosphate
  modified_base 16: mod_base = OTHER; note = 2'-deoxy-2'-fluoroguanosine-3'-phosphate
  modified_base 17: mod_base = OTHER; note = 2'-O-methylguanosine-3'-phosphate
  modified_base 18: mod_base = OTHER; note = 2'-O-methyluridine-3'-phosphate
  modified_base 19: mod_base = OTHER; note = 2'-O-methylguanosine-3'-phosphate
  modified_base 20: mod_base = OTHER; note = 2'-O-methylcytidine-3'-phosphate
  modified_base 21: mod_base = OTHER; note = 2'-O-methyladenosine-3'-phosphorothioate
  modified_base 22: mod_base = OTHER; note = 2'-O-methylguanosine-3'-phosphorothioate
  modified_base 23: mod_base = OTHER; note = 2'-O-methylguanosine
ttccctctggttgttggtgcagg

SEQ ID NO: 2920 - RNA, 23 nt, synthetic construct
  source 1..23: mol_type = other RNA
  modified_base 1: mod_base = OTHER; note = 2'-O-methyluridine-3'-phosphorothioate 5'-(E)-Vinylphosphonate
  modified_base 2: mod_base = OTHER; note = 2'-deoxy-2'-fluoroguanosine-3'-phosphorothioate
  modified_base 3: mod_base = OTHER; note = 2'-O-methyluridine-3'-phosphate
  modified_base 4: mod_base = OTHER; note = 2'-O-methyluridine-3'-phosphate
  modified_base 5: mod_base = OTHER; note = 2'-O-methylcytidine-3'-phosphate
  modified_base 6: mod_base = OTHER; note = 2'-deoxy-2'-fluorocytidine-3'-phosphate
  modified_base 7: mod_base = OTHER; note = 2'-O-methylguanosine-3'-phosphate
  modified_base 8: mod_base = OTHER; note = 2'-deoxy-2'-fluorouridine-3'-phosphate
  modified_base 9: mod_base = OTHER; note = 2'-deoxy-2'-fluorocytidine-3'-phosphate
  modified_base 10: mod_base = OTHER; note = 2'-O-methylcytidine-3'-phosphate
  modified_base 11: mod_base = OTHER; note = 2'-O-methylcytidine-3'-phosphate
  modified_base 12: mod_base = OTHER; note = 2'-O-methylguanosine-3'-phosphate
  modified_base 13: mod_base = OTHER; note = 2'-O-methylcytidine-3'-phosphate
  modified_base 14: mod_base = OTHER; note = 2'-deoxy-2'-fluorouridine-3'-phosphate
  modified_base 15: mod_base = OTHER; note = 2'-O-methylguanosine-3'-phosphate
  modified_base 16: mod_base = OTHER; note = 2'-deoxy-2'-fluoroguanosine-3'-phosphate
  modified_base 17: mod_base = OTHER; note = 2'-O-methyladenosine-3'-phosphate
  modified_base 18: mod_base = OTHER; note = 2'-O-methylguanosine-3'-phosphate
  modified_base 19: mod_base = OTHER; note = 2'-O-methyladenosine-3'-phosphate
  modified_base 20: mod_base = OTHER; note = 2'-O-methylcytidine-3'-phosphate
  modified_base 21: mod_base = OTHER; note = 2'-O-methyladenosine-3'-phosphorothioate
  modified_base 22: mod_base = OTHER; note = 2'-O-methylguanosine-3'-phosphorothioate
  modified_base 23: mod_base = OTHER; note = 2'-O-methyluridine
tgttccgtcccgctggagacagt

SEQ ID NO: 2921 - RNA, 23 nt, synthetic construct
  source 1..23: mol_type = other RNA
  modified_base 1: mod_base = OTHER; note = 2'-O-methyluridine-3'-phosphorothioate 5'-(E)-Vinylphosphonate
  modified_base 2: mod_base = OTHER; note = 2'-deoxy-2'-fluorocytidine-3'-phosphorothioate
  modified_base 3: mod_base = OTHER; note = 2'-O-methylcytidine-3'-phosphate
  modified_base 4: mod_base = OTHER; note = 2'-O-methyladenosine-3'-phosphate
  modified_base 5: mod_base = OTHER; note = 2'-O-methyluridine-3'-phosphate
  modified_base 6: mod_base = OTHER; note = 2'-deoxy-2'-fluoroguanosine-3'-phosphate
  modified_base 7: mod_base = OTHER; note = 2'-O-methyluridine-3'-phosphate
  modified_base 8: mod_base = OTHER; note = 2'-deoxy-2'-fluorocytidine-3'-phosphate
  modified_base 9: mod_base = OTHER; note = 2'-deoxy-2'-fluorocytidine-3'-phosphate
  modified_base 10: mod_base = OTHER; note = 2'-O-methyluridine-3'-phosphate
  modified_base 11: mod_base = OTHER; note = 2'-O-methyluridine-3'-phosphate
  modified_base 12: mod_base = OTHER; note = 2'-O-methylguanosine-3'-phosphate
  modified_base 13: mod_base = OTHER; note = 2'-O-methylcytidine-3'-phosphate
  modified_base 14: mod_base = OTHER; note = 2'-deoxy-2'-fluoroadenosine-3'-phosphate
  modified_base 15: mod_base = OTHER; note = 2'-O-methyladenosine-3'-phosphate
  modified_base 16: mod_base = OTHER; note = 2'-deoxy-2'-fluorocytidine-3'-phosphate
  modified_base 17: mod_base = OTHER; note = 2'-O-methyluridine-3'-phosphate
  modified_base 18: mod_base = OTHER; note = 2'-O-methylguanosine-3'-phosphate
  modified_base 19: mod_base = OTHER; note = 2'-O-methylguanosine-3'-phosphate
  modified_base 20: mod_base = OTHER; note = 2'-O-methylcytidine-3'-phosphate
  modified_base 21: mod_base = OTHER; note = 2'-O-methylguanosine-3'-phosphorothioate
  modified_base 22: mod_base = OTHER; note = 2'-O-methylguanosine-3'-phosphorothioate
  modified_base 23: mod_base = OTHER; note = 2'-O-methylcytidine
tccatgtccttgcaactggcggc

SEQ ID NO: 2922 - RNA, 23 nt, synthetic construct
  source 1..23: mol_type = other RNA
  modified_base 1: mod_base = OTHER; note = 2'-O-methyluridine-3'-phosphorothioate 5'-(E)-Vinylphosphonate
  modified_base 2: mod_base = OTHER; note = 2'-deoxy-2'-fluoroadenosine-3'-phosphorothioate
  modified_base 3: mod_base = OTHER; note = 2'-O-methylguanosine-3'-phosphate
  modified_base 4: mod_base = OTHER; note = 2'-O-methylcytidine-3'-phosphate
  modified_base 5: mod_base = OTHER; note = 2'-O-methylcytidine-3'-phosphate
  modified_base 6: mod_base = OTHER; note = 2'-deoxy-2'-fluoroadenosine-3'-phosphate
  modified_base 7: mod_base = OTHER; note = 2'-O-methyluridine-3'-phosphate
  modified_base 8: mod_base = OTHER; note = 2'-deoxy-2'-fluorocytidine-3'-phosphate
  modified_base 9: mod_base = OTHER; note = 2'-deoxy-2'-fluorocytidine-3'-phosphate
  modified_base 10: mod_base = OTHER; note = 2'-O-methyluridine-3'-phosphate
  modified_base 11: mod_base = OTHER; note = 2'-O-methyluridine-3'-phosphate
  modified_base 12: mod_base = OTHER; note = 2'-O-methyluridine-3'-phosphate
  modified_base 13: mod_base = OTHER; note = 2'-O-methylcytidine-3'-phosphate
  modified_base 14: mod_base = OTHER; note = 2'-deoxy-2'-fluorouridine-3'-phosphate
  modified_base 15: mod_base = OTHER; note = 2'-O-methylguanosine-3'-phosphate
  modified_base 16: mod_base = OTHER; note = 2'-deoxy-2'-fluorocytidine-3'-phosphate
  modified_base 17: mod_base = OTHER; note = 2'-O-methyluridine-3'-phosphate
  modified_base 18: mod_base = OTHER; note = 2'-O-methylguanosine-3'-phosphate
  modified_base 19: mod_base = OTHER; note = 2'-O-methyluridine-3'-phosphate
  modified_base 20: mod_base = OTHER; note = 2'-O-methylcytidine-3'-phosphate
  modified_base 21: mod_base = OTHER; note = 2'-O-methylguanosine-3'-phosphorothioate
  modified_base 22: mod_base = OTHER; note = 2'-O-methylguanosine-3'-phosphorothioate
  modified_base 23: mod_base = OTHER; note = 2'-O-methylguanosine
tagccatcctttctgctgtcggg

SEQ ID NO: 2923 - RNA, 23 nt, synthetic construct
  source 1..23: mol_type = other RNA
  modified_base 1: mod_base = OTHER; note = 2'-O-methyluridine-3'-phosphorothioate 5'-(E)-Vinylphosphonate
  modified_base 2: mod_base = OTHER; note = 2'-deoxy-2'-fluoroadenosine-3'-phosphorothioate
  modified_base 3: mod_base = OTHER; note = 2'-O-methylguanosine-3'-phosphate
  modified_base 4: mod_base = OTHER; note = 2'-O-methylcytidine-3'-phosphate
  modified_base 5: mod_base = OTHER; note = 2'-O-methyladenosine-3'-phosphate
  modified_base 6: mod_base = OTHER; note = 2'-deoxy-2'-fluorouridine-3'-phosphate
  modified_base 7: mod_base = OTHER; note = 2'-O-methylcytidine-3'-phosphate
  modified_base 8: mod_base = OTHER; note = 2'-deoxy-2'-fluoroadenosine-3'-phosphate
  modified_base 9: mod_base = OTHER; note = 2'-deoxy-2'-fluoroguanosine-3'-phosphate
  modified_base 10: mod_base = OTHER; note = 2'-O-methyladenosine-3'-phosphate
  modified_base 11: mod_base = OTHER; note = 2'-O-methyluridine-3'-phosphate
  modified_base 12: mod_base = OTHER; note = 2'-O-methylcytidine-3'-phosphate
  modified_base 13: mod_base = OTHER; note = 2'-O-methyladenosine-3'-phosphate
  modified_base 14: mod_base = OTHER; note = 2'-deoxy-2'-fluorocytidine-3'-phosphate
  modified_base 15: mod_base = OTHER; note = 2'-O-methyladenosine-3'-phosphate
  modified_base 16: mod_base = OTHER; note = 2'-deoxy-2'-fluoroguanosine-3'-phosphate
  modified_base 17: mod_base = OTHER; note = 2'-O-methyladenosine-3'-phosphate
  modified_base 18: mod_base = OTHER; note = 2'-O-methylguanosine-3'-phosphate
  modified_base 19: mod_base = OTHER; note = 2'-O-methylcytidine-3'-phosphate
  modified_base 20: mod_base = OTHER; note = 2'-O-methylguanosine-3'-phosphate
  modified_base 21: mod_base = OTHER; note = 2'-O-methylguanosine-3'-phosphorothioate
  modified_base 22: mod_base = OTHER; note = 2'-O-methylcytidine-3'-phosphorothioate
  modified_base 23: mod_base = OTHER; note = 2'-O-methyluridine
tagcatcagatcacagagcggct

SEQ ID NO: 2924 - RNA, 23 nt, synthetic construct
  source 1..23: mol_type = other RNA
  modified_base 1: mod_base = OTHER; note = 2'-O-methyluridine-3'-phosphorothioate 5'-(E)-Vinylphosphonate
  modified_base 2: mod_base = OTHER; note = 2'-deoxy-2'-fluorouridine-3'-phosphorothioate
  modified_base 3: mod_base = OTHER; note = 2'-O-methylguanosine-3'-phosphate
  modified_base 4: mod_base = OTHER; note = 2'-O-methylguanosine-3'-phosphate
  modified_base 5: mod_base = OTHER; note = 2'-O-methylcytidine-3'-phosphate
  modified_base 6: mod_base = OTHER; note = 2'-deoxy-2'-fluoroadenosine-3'-phosphate
  modified_base 7: mod_base = OTHER; note = 2'-O-methylcytidine-3'-phosphate
  modified_base 8: mod_base = OTHER; note = 2'-deoxy-2'-fluorouridine-3'-phosphate
  modified_base 9: mod_base = OTHER; note = 2'-deoxy-2'-fluorocytidine-3'-phosphate
  modified_base 10: mod_base = OTHER; note = 2'-O-methyladenosine-3'-phosphate
  modified_base 11: mod_base = OTHER; note = 2'-O-methylguanosine-3'-phosphate
  modified_base 12: mod_base = OTHER; note = 2'-O-methylcytidine-3'-phosphate
  modified_base 13: mod_base = OTHER; note = 2'-O-methyladenosine-3'-phosphate
  modified_base 14: mod_base = OTHER; note = 2'-deoxy-2'-fluoroadenosine-3'-phosphate
  modified_base 15: mod_base = OTHER; note = 2'-O-methyladenosine-3'-phosphate
  modified_base 16: mod_base = OTHER; note = 2'-deoxy-2'-fluoroguanosine-3'-phosphate
  modified_base 17: mod_base = OTHER; note = 2'-O-methyladenosine-3'-phosphate
  modified_base 18: mod_base = OTHER; note = 2'-O-methylcytidine-3'-phosphate
  modified_base 19: mod_base = OTHER; note = 2'-O-methylcytidine-3'-phosphate
  modified_base 20: mod_base = OTHER; note = 2'-O-methyluridine-3'-phosphate
  modified_base 21: mod_base = OTHER; note = 2'-O-methylguanosine-3'-phosphorothioate
  modified_base 22: mod_base = OTHER; note = 2'-O-methylguanosine-3'-phosphorothioate
  modified_base 23: mod_base = OTHER; note = 2'-O-methylcytidine
ttggcactcagcaaagacctggc

SEQ ID NO: 2925 - RNA, 23 nt, synthetic construct
  source 1..23: mol_type = other RNA
  modified_base 1: mod_base = OTHER; note = 2'-O-methyluridine-3'-phosphorothioate 5'-(E)-Vinylphosphonate
  modified_base 2: mod_base = OTHER; note = 2'-deoxy-2'-fluoroadenosine-3'-phosphorothioate
  modified_base 3: mod_base = OTHER; note = 2'-O-methylguanosine-3'-phosphate
  modified_base 4: mod_base = OTHER; note = 2'-O-methylguanosine-3'-phosphate
  modified_base 5: mod_base = OTHER; note = 2'-O-methylcytidine-3'-phosphate
  modified_base 6: mod_base = OTHER; note = 2'-deoxy-2'-fluoroguanosine-3'-phosphate
  modified_base 7: mod_base = OTHER; note = 2'-O-methyluridine-3'-phosphate
  modified_base 8: mod_base = OTHER; note = 2'-deoxy-2'-fluorouridine-3'-phosphate
  modified_base 9: mod_base = OTHER; note = 2'-deoxy-2'-fluoroguanosine-3'-phosphate
  modified_base 10: mod_base = OTHER; note = 2'-O-methyladenosine-3'-phosphate
  modified_base 11: mod_base = OTHER; note = 2'-O-methyladenosine-3'-phosphate
  modified_base 12: mod_base = OTHER; note = 2'-O-methylguanosine-3'-phosphate
  modified_base 13: mod_base = OTHER; note = 2'-O-methyladenosine-3'-phosphate
  modified_base 14: mod_base = OTHER; note = 2'-deoxy-2'-fluoroadenosine-3'-phosphate
  modified_base 15: mod_base = OTHER; note = 2'-O-methyluridine-3'-phosphate
  modified_base 16: mod_base = OTHER; note = 2'-deoxy-2'-fluoroguanosine-3'-phosphate
  modified_base 17: mod_base = OTHER; note = 2'-O-methylguanosine-3'-phosphate
  modified_base 18: mod_base = OTHER; note = 2'-O-methylguanosine-3'-phosphate
  modified_base 19: mod_base = OTHER; note = 2'-O-methylcytidine-3'-phosphate
  modified_base 20: mod_base = OTHER; note = 2'-O-methylcytidine-3'-phosphate
  modified_base 21: mod_base = OTHER; note = 2'-O-methylcytidine-3'-phosphorothioate
  modified_base 22: mod_base = OTHER; note = 2'-O-methylguanosine-3'-phosphorothioate
  modified_base 23: mod_base = OTHER; note = 2'-O-methylguanosine
taggcgttgaagaatgggcccgg

SEQ ID NO: 2926 - RNA, 23 nt, synthetic construct
  source 1..23: mol_type = other RNA
  modified_base 1: mod_base = OTHER; note = 2'-O-methyluridine-3'-phosphorothioate 5'-(E)-Vinylphosphonate
  modified_base 2: mod_base = OTHER; note = 2'-deoxy-2'-fluorocytidine-3'-phosphorothioate
  modified_base 3: mod_base = OTHER; note = 2'-O-methyladenosine-3'-phosphate
  modified_base 4: mod_base = OTHER; note = 2'-O-methylguanosine-3'-phosphate
  modified_base 5: mod_base = OTHER; note = 2'-O-methyladenosine-3'-phosphate
  modified_base 6: mod_base = OTHER; note = 2'-deoxy-2'-fluoroguanosine-3'-phosphate
  modified_base 7: mod_base = OTHER; note = 2'-O-methylcytidine-3'-phosphate
  modified_base 8: mod_base = OTHER; note = 2'-deoxy-2'-fluorouridine-3'-phosphate
  modified_base 9: mod_base = OTHER; note = 2'-deoxy-2'-fluorocytidine-3'-phosphate
  modified_base 10: mod_base = OTHER; note = 2'-O-methyluridine-3'-phosphate
  modified_base 11: mod_base = OTHER; note = 2'-O-methylguanosine-3'-phosphate
  modified_base 12: mod_base = OTHER; note = 2'-O-methylcytidine-3'-phosphate
  modified_base 13: mod_base = OTHER; note = 2'-O-methylguanosine-3'-phosphate
  modified_base 14: mod_base = OTHER; note = 2'-deoxy-2'-fluorouridine-3'-phosphate
  modified_base 15: mod_base = OTHER; note = 2'-O-methyladenosine-3'-phosphate
  modified_base 16: mod_base = OTHER; note = 2'-deoxy-2'-fluoroadenosine-3'-phosphate
  modified_base 17: mod_base = OTHER; note = 2'-O-methylguanosine-3'-phosphate
  modified_base 18: mod_base = OTHER; note = 2'-O-methylcytidine-3'-phosphate
  modified_base 19: mod_base = OTHER; note = 2'-O-methylcytidine-3'-phosphate
  modified_base 20: mod_base = OTHER; note = 2'-O-methyluridine-3'-phosphate
  modified_base 21: mod_base = OTHER; note = 2'-O-methylcytidine-3'-phosphorothioate
  modified_base 22: mod_base = OTHER; note = 2'-O-methylcytidine-3'-phosphorothioate
  modified_base 23: mod_base = OTHER; note = 2'-O-methyladenosine
tcagagctctgcgtaagcctcca

SEQ ID NO: 2927 - RNA, 23 nt, synthetic construct
  source 1..23: mol_type = other RNA
  modified_base 1: mod_base = OTHER; note = 2'-O-methyluridine-3'-phosphorothioate 5'-(E)-Vinylphosphonate
  modified_base 2: mod_base = OTHER; note = 2'-deoxy-2'-fluorocytidine-3'-phosphorothioate
  modified_base 3: mod_base = OTHER; note = 2'-O-methyluridine-3'-phosphate
  modified_base 4: mod_base = OTHER; note = 2'-O-methylcytidine-3'-phosphate
  modified_base 5: mod_base = OTHER; note = 2'-O-methylguanosine-3'-phosphate
  modified_base 6: mod_base = OTHER; note = 2'-deoxy-2'-fluorocytidine-3'-phosphate
  modified_base 7: mod_base = OTHER; note = 2'-O-methylcytidine-3'-phosphate
  modified_base 8: mod_base = OTHER; note = 2'-deoxy-2'-fluoroadenosine-3'-phosphate
  modified_base 9: mod_base = OTHER; note = 2'-deoxy-2'-fluoroguanosine-3'-phosphate
  modified_base 10: mod_base = OTHER; note = 2'-O-methyluridine-3'-phosphate
  modified_base 11: mod_base = OTHER; note = 2'-O-methylcytidine-3'-phosphate
  modified_base 12: mod_base = OTHER; note = 2'-O-methyladenosine-3'-phosphate
  modified_base 13: mod_base = OTHER; note = 2'-O-methylcytidine-3'-phosphate
  modified_base 14: mod_base = OTHER; note = 2'-deoxy-2'-fluorouridine-3'-phosphate
  modified_base 15: mod_base = OTHER; note = 2'-O-methylguanosine-3'-phosphate
  modified_base 16: mod_base = OTHER; note = 2'-deoxy-2'-fluorocytidine-3'-phosphate
  modified_base 17: mod_base = OTHER; note = 2'-O-methyladenosine-3'-phosphate
  modified_base 18: mod_base = OTHER; note = 2'-O-methylcytidine-3'-phosphate
  modified_base 19: mod_base = OTHER; note = 2'-O-methyladenosine-3'-phosphate
  modified_base 20: mod_base = OTHER; note = 2'-O-methylcytidine-3'-phosphate
  modified_base 21: mod_base = OTHER; note = 2'-O-methyluridine-3'-phosphorothioate
  modified_base 22: mod_base = OTHER; note = 2'-O-methylcytidine-3'-phosphorothioate
  modified_base 23: mod_base = OTHER; note = 2'-O-methylcytidine
tctcgccagtcactgcacactcc

SEQ ID NO: 2928 - RNA, 23 nt, synthetic construct
  source 1..23: mol_type = other RNA
  modified_base 1: mod_base = OTHER; note = 2'-O-methyluridine-3'-phosphorothioate 5'-(E)-Vinylphosphonate
  modified_base 2: mod_base = OTHER; note = 2'-deoxy-2'-fluorouridine-3'-phosphorothioate
  modified_base 3: mod_base = OTHER; note = 2'-O-methylguanosine-3'-phosphate
  modified_base 4: mod_base = OTHER; note = 2'-O-methylguanosine-3'-phosphate
  modified_base 5: mod_base = OTHER; note = 2'-O-methylcytidine-3'-phosphate
  modified_base 6: mod_base = OTHER; note = 2'-deoxy-2'-fluorouridine-3'-phosphate
  modified_base 7: mod_base = OTHER; note = 2'-O-methyluridine-3'-phosphate
  modified_base 8: mod_base = OTHER; note = 2'-deoxy-2'-fluoroguanosine-3'-phosphate
  modified_base 9: mod_base = OTHER; note = 2'-deoxy-2'-fluorouridine-3'-phosphate
  modified_base 10: mod_base = OTHER; note = 2'-O-methyladenosine-3'-phosphate
  modified_base 11: mod_base = OTHER; note = 2'-O-methylcytidine-3'-phosphate
  modified_base 12: mod_base = OTHER; note = 2'-O-methyladenosine-3'-phosphate
  modified_base 13: mod_base = OTHER; note = 2'-O-methylcytidine-3'-phosphate
  modified_base 14: mod_base = OTHER; note = 2'-deoxy-2'-fluorouridine-3'-phosphate
  modified_base 15: mod_base = OTHER; note = 2'-O-methyluridine-3'-phosphate
  modified_base 16: mod_base = OTHER; note = 2'-deoxy-2'-fluorouridine-3'-phosphate
  modified_base 17: mod_base = OTHER; note = 2'-O-methylguanosine-3'-phosphate
  modified_base 18: mod_base = OTHER; note = 2'-O-methylguanosine-3'-phosphate
  modified_base 19: mod_base = OTHER; note = 2'-O-methyluridine-3'-phosphate
  modified_base 20: mod_base = OTHER; note = 2'-O-methylguanosine-3'-phosphate
  modified_base 21: mod_base = OTHER; note = 2'-O-methylguanosine-3'-phosphorothioate
  modified_base 22: mod_base = OTHER; note = 2'-O-methylguanosine-3'-phosphorothioate
  modified_base 23: mod_base = OTHER; note = 2'-O-methyluridine
ttggcttgtacactttggtgggt

SEQ ID NO: 2929 - RNA, 23 nt, synthetic construct
  source 1..23: mol_type = other RNA
  modified_base 1: mod_base = OTHER; note = 2'-O-methyluridine-3'-phosphorothioate 5'-(E)-Vinylphosphonate
  modified_base 2: mod_base = OTHER; note = 2'-deoxy-2'-fluorouridine-3'-phosphorothioate
  modified_base 3: mod_base = OTHER; note = 2'-O-methylcytidine-3'-phosphate
  modified_base 4: mod_base = OTHER; note = 2'-O-methyluridine-3'-phosphate
  modified_base 5: mod_base = OTHER; note = 2'-O-methylguanosine-3'-phosphate
  modified_base 6: mod_base = OTHER; note = 2'-deoxy-2'-fluoroguanosine-3'-phosphate
  modified_base 7: mod_base = OTHER; note = 2'-O-methyluridine-3'-phosphate
  modified_base 8: mod_base = OTHER; note = 2'-deoxy-2'-fluorouridine-3'-phosphate
  modified_base 9: mod_base = OTHER; note = 2'-deoxy-2'-fluorocytidine-3'-phosphate
  modified_base 10: mod_base = OTHER; note = 2'-O-methylcytidine-3'-phosphate
  modified_base 11: mod_base = OTHER; note = 2'-O-methyluridine-3'-phosphate
  modified_base 12: mod_base = OTHER; note = 2'-O-methyladenosine-3'-phosphate
  modified_base 13: mod_base = OTHER; note = 2'-O-methylguanosine-3'-phosphate
  modified_base 14: mod_base = OTHER; note = 2'-deoxy-2'-fluoroadenosine-3'-phosphate
  modified_base 15: mod_base = OTHER; note = 2'-O-methylguanosine-3'-phosphate
  modified_base 16: mod_base = OTHER; note = 2'-deoxy-2'-fluorouridine-3'-phosphate
  modified_base 17: mod_base = OTHER; note = 2'-O-methyluridine-3'-phosphate
  modified_base 18: mod_base = OTHER; note = 2'-O-methylguanosine-3'-phosphate
  modified_base 19: mod_base = OTHER; note = 2'-O-methylcytidine-3'-phosphate
  modified_base 20: mod_base = OTHER; note = 2'-O-methyladenosine-3'-phosphate
  modified_base 21: mod_base = OTHER; note = 2'-O-methylguanosine-3'-phosphorothioate
  modified_base 22: mod_base = OTHER; note = 2'-O-methylguanosine-3'-phosphorothioate
  modified_base 23: mod_base = OTHER; note = 2'-O-methyluridine
ttctggttcctagagttgcaggt

SEQ ID NO: 2930 - RNA, 23 nt, synthetic construct
  source 1..23: mol_type = other RNA
  modified_base 1: mod_base = OTHER; note = 2'-O-methyluridine-3'-phosphorothioate 5'-(E)-Vinylphosphonate
  modified_base 2: mod_base = OTHER; note = 2'-deoxy-2'-fluorouridine-3'-phosphorothioate
  modified_base 3: mod_base = OTHER; note = 2'-O-methylguanosine-3'-phosphate
  modified_base 4: mod_base = OTHER; note = 2'-O-methyluridine-3'-phosphate
  modified_base 5: mod_base = OTHER; note = 2'-O-methylguanosine-3'-phosphate
  modified_base 6: mod_base = OTHER; note = 2'-deoxy-2'-fluorocytidine-3'-phosphate
  modified_base 7: mod_base = OTHER; note = 2'-O-methylguanosine-3'-phosphate
  modified_base 8: mod_base = OTHER; note = 2'-deoxy-2'-fluorouridine-3'-phosphate
  modified_base 9: mod_base = OTHER; note = 2'-deoxy-2'-fluorouridine-3'-phosphate
  modified_base 10: mod_base = OTHER; note = 2'-O-methylguanosine-3'-phosphate
  modified_base 11: mod_base = OTHER; note = 2'-O-methyladenosine-3'-phosphate
  modified_base 12: mod_base = OTHER; note = 2'-O-methyladenosine-3'-phosphate
  modified_base 13: mod_base = OTHER; note = 2'-O-methylguanosine-3'-phosphate
  modified_base 14: mod_base = OTHER; note = 2'-deoxy-2'-fluoroadenosine-3'-phosphate
  modified_base 15: mod_base = OTHER; note = 2'-O-methylguanosine-3'-phosphate
  modified_base 16: mod_base = OTHER; note = 2'-deoxy-2'-fluoroguanosine-3'-phosphate
  modified_base 17: mod_base = OTHER; note = 2'-O-methyladenosine-3'-phosphate
  modified_base 18: mod_base = OTHER; note = 2'-O-methyluridine-3'-phosphate
  modified_base 19: mod_base = OTHER; note = 2'-O-methylcytidine-3'-phosphate
  modified_base 20: mod_base = OTHER; note = 2'-O-methyluridine-3'-phosphate
  modified_base 21: mod_base = OTHER; note = 2'-O-methylguanosine-3'-phosphorothioate
  modified_base 22: mod_base = OTHER; note = 2'-O-methylguanosine-3'-phosphorothioate
  modified_base 23: mod_base = OTHER; note = 2'-O-methyluridine
ttgtgcgttgaagaggatctggt

SEQ ID NO: 2931 - RNA, 23 nt, synthetic construct
  source 1..23: mol_type = other RNA
  modified_base 1: mod_base = OTHER; note = 2'-O-methyluridine-3'-phosphorothioate 5'-(E)-Vinylphosphonate
  modified_base 2: mod_base = OTHER; note = 2'-deoxy-2'-fluoroadenosine-3'-phosphorothioate
  modified_base 3: mod_base = OTHER; note = 2'-O-methylguanosine-3'-phosphate
  modified_base 4: mod_base = OTHER; note = 2'-O-methylguanosine-3'-phosphate
  modified_base 5: mod_base = OTHER; note = 2'-O-methylcytidine-3'-phosphate
  modified_base 6: mod_base = OTHER; note = 2'-deoxy-2'-fluorocytidine-3'-phosphate
  modified_base 7: mod_base = OTHER; note = 2'-O-methyluridine-3'-phosphate
  modified_base 8: mod_base = OTHER; note = 2'-deoxy-2'-fluoroguanosine-3'-phosphate
  modified_base 9: mod_base = OTHER; note = 2'-deoxy-2'-fluorocytidine-3'-phosphate
  modified_base 10: mod_base = OTHER; note = 2'-O-methyladenosine-3'-phosphate
  modified_base 11: mod_base = OTHER; note = 2'-O-methylcytidine-3'-phosphate
  modified_base 12: mod_base = OTHER; note = 2'-O-methylguanosine-3'-phosphate
  modified_base 13: mod_base = OTHER; note = 2'-O-methylcytidine-3'-phosphate
  modified_base 14: mod_base = OTHER; note = 2'-deoxy-2'-fluoroadenosine-3'-phosphate
  modified_base 15: mod_base = OTHER; note = 2'-O-methylguanosine-3'-phosphate
  modified_base 16: mod_base = OTHER; note = 2'-deoxy-2'-fluoroadenosine-3'-phosphate
  modified_base 17: mod_base = OTHER; note = 2'-O-methyluridine-3'-phosphate
  modified_base 18: mod_base = OTHER; note = 2'-O-methylguanosine-3'-phosphate
  modified_base 19: mod_base = OTHER; note = 2'-O-methylcytidine-3'-phosphate
  modified_base 20: mod_base = OTHER; note = 2'-O-methylcytidine-3'-phosphate
  modified_base 21: mod_base = OTHER; note = 2'-O-methylcytidine-3'-phosphorothioate
  modified_base 22: mod_base = OTHER; note = 2'-O-methyladenosine-3'-phosphorothioate
  modified_base 23: mod_base = OTHER; note = 2'-O-methyluridine
taggcctgcacgcagatgcccat

SEQ ID NO: 2932 - RNA, 23 nt, synthetic construct
  source 1..23: mol_type = other RNA
  modified_base 1: mod_base = OTHER; note = 2'-O-methyluridine-3'-phosphorothioate 5'-(E)-Vinylphosphonate
  modified_base 2: mod_base = OTHER; note = 2'-deoxy-2'-fluoroguanosine-3'-phosphorothioate
  modified_base 3: mod_base = OTHER; note = 2'-O-methyladenosine-3'-phosphate
  modified_base 4: mod_base = OTHER; note = 2'-O-methyladenosine-3'-phosphate
  modified_base 5: mod_base = OTHER; note = 2'-O-methyladenosine-3'-phosphate
  modified_base 6: mod_base = OTHER; note = 2'-deoxy-2'-fluorouridine-3'-phosphate
  modified_base 7: mod_base = OTHER; note = 2'-O-methyluridine-3'-phosphate
  modified_base 8: mod_base = OTHER; note = 2'-deoxy-2'-fluorouridine-3'-phosphate
  modified_base 9: mod_base = OTHER; note = 2'-deoxy-2'-fluoroadenosine-3'-phosphate
  modified_base 10: mod_base = OTHER; note = 2'-O-methylguanosine-3'-phosphate
  modified_base 11: mod_base = OTHER; note = 2'-O-methylguanosine-3'-phosphate
  modified_base 12: mod_base = OTHER; note = 2'-O-methyladenosine-3'-phosphate
  modified_base 13: mod_base = OTHER; note = 2'-O-methyladenosine-3'-phosphate
  modified_base 14: mod_base = OTHER; note = 2'-deoxy-2'-fluoroadenosine-3'-phosphate
  modified_base 15: mod_base = OTHER; note = 2'-O-methylcytidine-3'-phosphate
  modified_base 16: mod_base = OTHER; note = 2'-deoxy-2'-fluorocytidine-3'-phosphate
  modified_base 17: mod_base = OTHER; note = 2'-O-methylcytidine-3'-phosphate
  modified_base 18: mod_base = OTHER; note = 2'-O-methyladenosine-3'-phosphate
  modified_base 19: mod_base = OTHER; note = 2'-O-methyluridine-3'-phosphate
  modified_base 20: mod_base = OTHER; note = 2'-O-methylcytidine-3'-phosphate
  modified_base 21: mod_base = OTHER; note = 2'-O-methylguanosine-3'-phosphorothioate
  modified_base 22: mod_base = OTHER; note = 2'-O-methylguanosine-3'-phosphorothioate
  modified_base 23: mod_base = OTHER; note = 2'-O-methylguanosine
tgaaatttaggaaacccatcggg

SEQ ID NO: 2933 - RNA, 23 nt, synthetic construct
  source 1..23: mol_type = other RNA
  modified_base 1: mod_base = OTHER; note = 2'-O-methyluridine-3'-phosphorothioate 5'-(E)-Vinylphosphonate
  modified_base 2: mod_base = OTHER; note = 2'-deoxy-2'-fluoroadenosine-3'-phosphorothioate
  modified_base 3: mod_base = OTHER; note = 2'-O-methylguanosine-3'-phosphate
  modified_base 4: mod_base = OTHER; note = 2'-O-methylguanosine-3'-phosphate
  modified_base 5: mod_base = OTHER; note = 2'-O-methyladenosine-3'-phosphate
  modified_base 6: mod_base = OTHER; note = 2'-deoxy-2'-fluorocytidine-3'-phosphate
  modified_base 7: mod_base = OTHER; note = 2'-O-methyluridine-3'-phosphate
  modified_base 8: mod_base = OTHER; note = 2'-deoxy-2'-fluoroguanosine-3'-phosphate
  modified_base 9: mod_base = OTHER; note = 2'-deoxy-2'-fluoroguanosine-3'-phosphate
  modified_base 10: mod_base = OTHER; note = 2'-O-methylcytidine-3'-phosphate
  modified_base 11: mod_base = OTHER; note = 2'-O-methyladenosine-3'-phosphate
  modified_base 12: mod_base = OTHER; note = 2'-O-methylguanosine-3'-phosphate
  modified_base 13: mod_base = OTHER; note = 2'-O-methyluridine-3'-phosphate
  modified_base 14: mod_base = OTHER; note = 2'-deoxy-2'-fluorouridine-3'-phosphate
  modified_base 15: mod_base = OTHER; note = 2'-O-methylguanosine-3'-phosphate
  modified_base 16: mod_base = OTHER; note = 2'-deoxy-2'-fluorocytidine-3'-phosphate
  modified_base 17: mod_base = OTHER; note = 2'-O-methyluridine-3'-phosphate
  modified_base 18: mod_base = OTHER; note = 2'-O-methylguanosine-3'-phosphate
  modified_base 19: mod_base = OTHER; note = 2'-O-methyladenosine-3'-phosphate
  modified_base 20: mod_base = OTHER; note = 2'-O-methylcytidine-3'-phosphate
  modified_base 21: mod_base = OTHER; note = 2'-O-methylcytidine-3'-phosphorothioate
  modified_base 22: mod_base = OTHER; note = 2'-O-methylcytidine-3'-phosphorothioate
  modified_base 23: mod_base = OTHER; note = 2'-O-methyladenosine
taggactggcagttgctgaccca

SEQ ID NO: 2934 - RNA, 23 nt, synthetic construct
  source 1..23: mol_type = other RNA
  modified_base 1: mod_base = OTHER; note = 2'-O-methyluridine-3'-phosphorothioate 5'-(E)-Vinylphosphonate
  modified_base 2: mod_base = OTHER; note = 2'-deoxy-2'-fluorouridine-3'-phosphorothioate
  modified_base 3: mod_base = OTHER; note = 2'-O-methylguanosine-3'-phosphate
  modified_base 4: mod_base = OTHER; note = 2'-O-methylcytidine-3'-phosphate
  modified_base 5: mod_base = OTHER; note = 2'-O-methyladenosine-3'-phosphate
  modified_base 6: mod_base = OTHER; note = 2'-deoxy-2'-fluorocytidine-3'-phosphate
  modified_base 7: mod_base = OTHER; note = 2'-O-methylcytidine-3'-phosphate
  modified_base 8: mod_base = OTHER; note = 2'-deoxy-2'-fluoroguanosine-3'-phosphate
  modified_base 9: mod_base = OTHER; note = 2'-deoxy-2'-fluoroadenosine-3'-phosphate
  modified_base 10: mod_base = OTHER; note = 2'-O-methylcytidine-3'-phosphate
  modified_base 11: mod_base = OTHER; note = 2'-O-methyladenosine-3'-phosphate
  modified_base 12: mod_base = OTHER; note = 2'-O-methylcytidine-3'-phosphate
  modified_base 13: mod_base = OTHER; note = 2'-O-methyluridine-3'-phosphate
  modified_base 14: mod_base = OTHER; note = 2'-deoxy-2'-fluoroguanosine-3'-phosphate
  modified_base 15: mod_base = OTHER; note = 2'-O-methyladenosine-3'-phosphate
  modified_base 16: mod_base = OTHER; note = 2'-deoxy-2'-fluoroadenosine-3'-phosphate
  modified_base 17: mod_base = OTHER; note = 2'-O-methylcytidine-3'-phosphate
  modified_base 18: mod_base = OTHER; note = 2'-O-methylcytidine-3'-phosphate
  modified_base 19: mod_base = OTHER; note = 2'-O-methylcytidine-3'-phosphate
  modified_base 20: mod_base = OTHER; note = 2'-O-methyluridine-3'-phosphate
  modified_base 21: mod_base = OTHER; note = 2'-O-methylcytidine-3'-phosphorothioate
  modified_base 22: mod_base = OTHER; note = 2'-O-methylguanosine-3'-phosphorothioate
  modified_base 23: mod_base = OTHER; note = 2'-O-methyluridine
ttgcaccgacactgaaccctcgt

SEQ ID NO: 2935 - RNA, 23 nt, synthetic construct
  source 1..23: mol_type = other RNA
  modified_base 1: mod_base = OTHER; note = 2'-O-methyluridine-3'-phosphorothioate 5'-(E)-Vinylphosphonate
  modified_base 2: mod_base = OTHER; note = 2'-deoxy-2'-fluorouridine-3'-phosphorothioate
  modified_base 3: mod_base = OTHER; note = 2'-O-methylguanosine-3'-phosphate
  modified_base 4: mod_base = OTHER; note = 2'-O-methylguanosine-3'-phosphate
  modified_base 5: mod_base = OTHER; note = 2'-O-methyluridine-3'-phosphate
  modified_base 6: mod_base = OTHER; note = 2'-deoxy-2'-fluorocytidine-3'-phosphate
  modified_base 7: mod_base = OTHER; note = 2'-O-methyladenosine-3'-phosphate
  modified_base 8: mod_base = OTHER; note = 2'-deoxy-2'-fluorocytidine-3'-phosphate
  modified_base 9: mod_base = OTHER; note = 2'-deoxy-2'-fluoroguanosine-3'-phosphate
  modified_base 10: mod_base = OTHER; note = 2'-O-methylguanosine-3'-phosphate
  modified_base 11: mod_base = OTHER; note = 2'-O-methyluridine-3'-phosphate
  modified_base 12: mod_base = OTHER; note = 2'-O-methyluridine-3'-phosphate
  modified_base 13: mod_base = OTHER; note = 2'-O-methyladenosine-3'-phosphate
  modified_base 14: mod_base = OTHER; note = 2'-deoxy-2'-fluorocytidine-3'-phosphate
  modified_base 15: mod_base = OTHER; note = 2'-O-methylguanosine-3'-phosphate
  modified_base 16: mod_base = OTHER; note = 2'-deoxy-2'-fluoroadenosine-3'-phosphate
  modified_base 17: mod_base = OTHER; note = 2'-O-methyladenosine-3'-phosphate
  modified_base 18: mod_base = OTHER; note = 2'-O-methylguanosine-3'-phosphate
  modified_base 19: mod_base = OTHER; note = 2'-O-methylcytidine-3'-phosphate
  modified_base 20: mod_base = OTHER; note = 2'-O-methylcytidine-3'-phosphate
  modified_base 21: mod_base = OTHER; note = 2'-O-methylguanosine-3'-phosphorothioate
  modified_base 22: mod_base = OTHER; note = 2'-O-methylguanosine-3'-phosphorothioate
  modified_base 23: mod_base = OTHER; note = 2'-O-methylguanosine
ttggtcacggttacgaagccggg

SEQ ID NO: 2936 - RNA, 23 nt, synthetic construct
  source 1..23: mol_type = other RNA
  modified_base 1: mod_base = OTHER; note = 2'-O-methyluridine-3'-phosphorothioate 5'-(E)-Vinylphosphonate
  modified_base 2: mod_base = OTHER; note = 2'-deoxy-2'-fluoroadenosine-3'-phosphorothioate
  modified_base 3: mod_base = OTHER; note = 2'-O-methylguanosine-3'-phosphate
  modified_base 4: mod_base = OTHER; note = 2'-O-methylguanosine-3'-phosphate
  modified_base 5: mod_base = OTHER; note = 2'-O-methyluridine-3'-phosphate
  modified_base 6: mod_base = OTHER; note = 2'-deoxy-2'-fluoroguanosine-3'-phosphate
  modified_base 7: mod_base = OTHER; note = 2'-O-methylguanosine-3'-phosphate
  modified_base 8: mod_base = OTHER; note = 2'-deoxy-2'-fluorouridine-3'-phosphate
  modified_base 9: mod_base = OTHER; note = 2'-deoxy-2'-fluorouridine-3'-phosphate
  modified_base 10: mod_base = OTHER; note = 2'-O-methylguanosine-3'-phosphate
  modified_base 11: mod_base = OTHER; note = 2'-O-methyluridine-3'-phosphate
  modified_base 12: mod_base = OTHER; note = 2'-O-methylguanosine-3'-phosphate
  modified_base 13: mod_base = OTHER; note = 2'-O-methyluridine-3'-phosphate
  modified_base 14: mod_base = OTHER; note = 2'-deoxy-2'-fluorouridine-3'-phosphate
  modified_base 15: mod_base = OTHER; note = 2'-O-methylguanosine-3'-phosphate
  modified_base 16: mod_base = OTHER; note = 2'-deoxy-2'-fluorocytidine-3'-phosphate
  modified_base 17: mod_base = OTHER; note = 2'-O-methyladenosine-3'-phosphate
  modified_base 18: mod_base = OTHER; note = 2'-O-methylcytidine-3'-phosphate
  modified_base 19: mod_base = OTHER; note = 2'-O-methyladenosine-3'-phosphate
  modified_base 20: mod_base = OTHER; note = 2'-O-methylcytidine-3'-phosphate
  modified_base 21: mod_base = OTHER; note = 2'-O-methylguanosine-3'-phosphorothioate
  modified_base 22: mod_base = OTHER; note = 2'-O-methylcytidine-3'-phosphorothioate
  modified_base 23: mod_base = OTHER; note = 2'-O-methyladenosine
taggtggttgtgttgcacacgca

SEQ ID NO: 2937 - RNA, 23 nt, synthetic construct
  source 1..23: mol_type = other RNA
  modified_base 1: mod_base = OTHER; note = 2'-O-methyluridine-3'-phosphorothioate 5'-(E)-Vinylphosphonate
  modified_base 2: mod_base = OTHER; note = 2'-deoxy-2'-fluorouridine-3'-phosphorothioate
  modified_base 3: mod_base = OTHER; note = 2'-O-methylguanosine-3'-phosphate
  modified_base 4: mod_base = OTHER; note = 2'-O-methylguanosine-3'-phosphate
  modified_base 5: mod_base = OTHER; note = 2'-O-methylguanosine-3'-phosphate
  modified_base 6: mod_base = OTHER; note = 2'-deoxy-2'-fluorouridine-3'-phosphate
  modified_base 7: mod_base = OTHER; note = 2'-O-methylguanosine-3'-phosphate
  modified_base 8: mod_base = OTHER; note = 2'-deoxy-2'-fluorocytidine-3'-phosphate
  modified_base 9: mod_base = OTHER; note = 2'-deoxy-2'-fluoroadenosine-3'-phosphate
  modified_base 10: mod_base = OTHER; note = 2'-O-methylguanosine-3'-phosphate
  modified_base 11: mod_base = OTHER; note = 2'-O-methyladenosine-3'-phosphate
  modified_base 12: mod_base = OTHER; note = 2'-O-methyluridine-3'-phosphate
  modified_base 13: mod_base = OTHER; note = 2'-O-methylguanosine-3'-phosphate
  modified_base 14: mod_base = OTHER; note = 2'-deoxy-2'-fluoroguanosine-3'-phosphate
  modified_base 15: mod_base = OTHER; note = 2'-O-methyladenosine-3'-phosphate
  modified_base 16: mod_base = OTHER; note = 2'-deoxy-2'-fluorocytidine-3'-phosphate
  modified_base 17: mod_base = OTHER; note = 2'-O-methyluridine-3'-phosphate
  modified_base 18: mod_base = OTHER; note = 2'-O-methylcytidine-3'-phosphate
  modified_base 19: mod_base = OTHER; note = 2'-O-methylcytidine-3'-phosphate
  modified_base 20: mod_base = OTHER; note = 2'-O-methyluridine-3'-phosphate
  modified_base 21: mod_base = OTHER; note = 2'-O-methylguanosine-3'-phosphorothioate
  modified_base 22: mod_base = OTHER; note = 2'-O-methylcytidine-3'-phosphorothioate
  modified_base 23: mod_base = OTHER; note = 2'-O-methylcytidine
ttgggtgcagatggactcctgcc

SEQ ID NO: 2938 - RNA, 23 nt, synthetic construct
  source 1..23: mol_type = other RNA
  modified_base 1: mod_base = OTHER; note = 2'-O-methyluridine-3'-phosphorothioate 5'-(E)-Vinylphosphonate
  modified_base 2: mod_base = OTHER; note = 2'-deoxy-2'-fluorouridine-3'-phosphorothioate
  modified_base 3: mod_base = OTHER; note = 2'-O-methylguanosine-3'-phosphate
  modified_base 4: mod_base = OTHER; note = 2'-O-methylcytidine-3'-phosphate
  modified_base 5: mod_base = OTHER; note = 2'-O-methyladenosine-3'-phosphate
  modified_base 6: mod_base = OTHER; note = 2'-deoxy-2'-fluoroguanosine-3'-phosphate
  modified_base 7: mod_base = OTHER; note = 2'-O-methylcytidine-3'-phosphate
  modified_base 8: mod_base = OTHER; note = 2'-deoxy-2'-fluoroguanosine-3'-phosphate
  modified_base 9: mod_base = OTHER; note = 2'-deoxy-2'-fluoroguanosine-3'-phosphate
  modified_base 10: mod_base = OTHER; note = 2'-O-methyladenosine-3'-phosphate
  modified_base 11: mod_base = OTHER; note = 2'-O-methyladenosine-3'-phosphate
  modified_base 12: mod_base = OTHER; note = 2'-O-methylguanosine-3'-phosphate
  modified_base 13: mod_base = OTHER; note = 2'-O-methylguanosine-3'-phosphate
  modified_base 14: mod_base = OTHER; note = 2'-deoxy-2'-fluorouridine-3'-phosphate
  modified_base 15: mod_base = OTHER; note = 2'-O-methylguanosine-3'-phosphate
  modified_base 16: mod_base = OTHER; note = 2'-deoxy-2'-fluoroguanosine-3'-phosphate
  modified_base 17: mod_base = OTHER; note = 2'-O-methylguanosine-3'-phosphate
  modified_base 18: mod_base = OTHER; note = 2'-O-methyladenosine-3'-phosphate
  modified_base 19: mod_base = OTHER; note = 2'-O-methylcytidine-3'-phosphate
  modified_base 20: mod_base = OTHER; note = 2'-O-methyladenosine-3'-phosphate
  modified_base 21: mod_base = OTHER; note = 2'-O-methylguanosine-3'-phosphorothioate
  modified_base 22: mod_base = OTHER; note = 2'-O-methylcytidine-3'-phosphorothioate
  modified_base 23: mod_base = OTHER; note = 2'-O-methyladenosine
ttgcagcggaaggtgggacagca

SEQ ID NO: 2939 - RNA, 23 nt, synthetic construct
  source 1..23: mol_type = other RNA
  modified_base 1: mod_base = OTHER; note = 2'-O-methyluridine-3'-phosphorothioate 5'-(E)-Vinylphosphonate
  modified_base 2: mod_base = OTHER; note = 2'-deoxy-2'-fluorocytidine-3'-phosphorothioate
  modified_base 3: mod_base = OTHER; note = 2'-O-methyladenosine-3'-phosphate
  modified_base 4: mod_base = OTHER; note = 2'-O-methyluridine-3'-phosphate
  modified_base 5: mod_base = OTHER; note = 2'-O-methyluridine-3'-phosphate
  modified_base 6: mod_base = OTHER; note = 2'-deoxy-2'-fluoroguanosine-3'-phosphate
  modified_base 7: mod_base = OTHER; note = 2'-O-methyluridine-3'-phosphate
  modified_base 8: mod_base = OTHER; note = 2'-deoxy-2'-fluoroadenosine-3'-phosphate
  modified_base 9: mod_base = OTHER; note = 2'-deoxy-2'-fluorocytidine-3'-phosphate
  modified_base 10: mod_base = OTHER; note = 2'-O-methylguanosine-3'-phosphate
  modified_base 11: mod_base = OTHER; note = 2'-O-methyladenosine-3'-phosphate
  modified_base 12: mod_base = OTHER; note = 2'-O-methyladenosine-3'-phosphate
  modified_base 13: mod_base = OTHER; note = 2'-O-methylcytidine-3'-phosphate
  modified_base 14: mod_base = OTHER; note = 2'-deoxy-2'-fluoroadenosine-3'-phosphate
  modified_base 15: mod_base = OTHER; note = 2'-O-methylcytidine-3'-phosphate
  modified_base 16: mod_base = OTHER; note = 2'-deoxy-2'-fluoroadenosine-3'-phosphate
  modified_base 17: mod_base = OTHER; note = 2'-O-methylguanosine-3'-phosphate
  modified_base 18: mod_base = OTHER; note = 2'-O-methylcytidine-3'-phosphate
  modified_base 19: mod_base = OTHER; note = 2'-O-methyluridine-3'-phosphate
  modified_base 20: mod_base = OTHER; note = 2'-O-methylguanosine-3'-phosphate
  modified_base 21: mod_base = OTHER; note = 2'-O-methyladenosine-3'-phosphorothioate
  modified_base 22: mod_base = OTHER; note = 2'-O-methylguanosine-3'-phosphorothioate
  modified_base 23: mod_base = OTHER; note = 2'-O-methylguanosine
tcattgtacgaacacagctgagg

SEQ ID NO: 2940 - RNA, 23 nt, synthetic construct
  source 1..23: mol_type = other RNA
  modified_base 1: mod_base = OTHER; note = 2'-O-methyluridine-3'-phosphorothioate 5'-(E)-Vinylphosphonate
  modified_base 2: mod_base = OTHER; note = 2'-deoxy-2'-fluoroguanosine-3'-phosphorothioate
  modified_base 3: mod_base = OTHER; note = 2'-O-methylcytidine-3'-phosphate
  modified_base 4: mod_base = OTHER; note = 2'-O-methylcytidine-3'-phosphate
  modified_base 5: mod_base = OTHER; note = 2'-O-methyluridine-3'-phosphate
  modified_base 6: mod_base = OTHER; note = 2'-deoxy-2'-fluoroguanosine-3'-phosphate
  modified_base 7: mod_base = OTHER; note = 2'-O-methylguanosine-3'-phosphate
  modified_base 8: mod_base = OTHER; note = 2'-deoxy-2'-fluoroguanosine-3'-phosphate
  modified_base 9: mod_base = OTHER; note = 2'-deoxy-2'-fluoroadenosine-3'-phosphate
  modified_base 10: mod_base = OTHER; note = 2'-O-methyladenosine-3'-phosphate
  modified_base 11: mod_base = OTHER; note = 2'-O-methylguanosine-3'-phosphate
  modified_base 12: mod_base = OTHER; note = 2'-O-methylguanosine-3'-phosphate
  modified_base 13: mod_base = OTHER; note = 2'-O-methyluridine-3'-phosphate
  modified_base 14: mod_base = OTHER; note = 2'-deoxy-2'-fluorouridine-3'-phosphate
  modified_base 15: mod_base = OTHER; note = 2'-O-methylguanosine-3'-phosphate
  modified_base 16: mod_base = OTHER; note = 2'-deoxy-2'-fluorocytidine-3'-phosphate
  modified_base 17: mod_base = OTHER; note = 2'-O-methyladenosine-3'-phosphate
  modified_base 18: mod_base = OTHER; note = 2'-O-methylcytidine-3'-phosphate
  modified_base 19: mod_base = OTHER; note = 2'-O-methylcytidine-3'-phosphate
  modified_base 20: mod_base = OTHER; note = 2'-O-methyladenosine-3'-phosphate
  modified_base 21: mod_base = OTHER; note = 2'-O-methyladenosine-3'-phosphorothioate
  modified_base 22: mod_base = OTHER; note = 2'-O-methylcytidine-3'-phosphorothioate
  modified_base 23: mod_base = OTHER; note = 2'-O-methylcytidine
tgcctgggaaggttgcaccaacc

SEQ ID NO: 2941 - RNA, 23 nt, synthetic construct
  source 1..23: mol_type = other RNA
  modified_base 1: mod_base = OTHER; note = 2'-O-methyluridine-3'-phosphorothioate 5'-(E)-Vinylphosphonate
  modified_base 2: mod_base = OTHER; note = 2'-deoxy-2'-fluoroadenosine-3'-phosphorothioate
  modified_base 3: mod_base = OTHER; note = 2'-O-methylguanosine-3'-phosphate
  modified_base 4: mod_base = OTHER; note = 2'-O-methylguanosine-3'-phosphate
  modified_base 5: mod_base = OTHER; note = 2'-O-methyluridine-3'-phosphate
  modified_base 6: mod_base = OTHER; note = 2'-deoxy-2'-fluoroadenosine-3'-phosphate
  modified_base 7: mod_base = OTHER; note = 2'-O-methylcytidine-3'-phosphate
  modified_base 8: mod_base = OTHER; note = 2'-deoxy-2'-fluoroadenosine-3'-phosphate
  modified_base 9: mod_base = OTHER; note = 2'-deoxy-2'-fluorocytidine-3'-phosphate
  modified_base 10: mod_base = OTHER; note = 2'-O-methyladenosine-3'-phosphate
  modified_base 11: mod_base = OTHER; note = 2'-O-methyluridine-3'-phosphate
  modified_base 12: mod_base = OTHER; note = 2'-O-methylguanosine-3'-phosphate
  modified_base 13: mod_base = OTHER; note = 2'-O-methyluridine-3'-phosphate
  modified_base 14: mod_base = OTHER; note = 2'-deoxy-2'-fluoroguanosine-3'-phosphate
  modified_base 15: mod_base = OTHER; note = 2'-O-methylguanosine-3'-phosphate
  modified_base 16: mod_base = OTHER; note = 2'-deoxy-2'-fluorocytidine-3'-phosphate
  modified_base 17: mod_base = OTHER; note = 2'-O-methyladenosine-3'-phosphate
  modified_base 18: mod_base = OTHER; note = 2'-O-methylguanosine-3'-phosphate
  modified_base 19: mod_base = OTHER; note = 2'-O-methylguanosine-3'-phosphate
  modified_base 20: mod_base = OTHER; note = 2'-O-methylguanosine-3'-phosphate
  modified_base 21: mod_base = OTHER; note = 2'-O-methyladenosine-3'-phosphorothioate
  modified_base 22: mod_base = OTHER; note = 2'-O-methyladenosine-3'-phosphorothioate
  modified_base 23: mod_base = OTHER; note = 2'-O-methylguanosine
taggtacacatgtggcagggaag

SEQ ID NO: 2942 - RNA, 23 nt, synthetic construct
  source 1..23: mol_type = other RNA
  modified_base 1: mod_base = OTHER; note = 2'-O-methyluridine-3'-phosphorothioate 5'-(E)-Vinylphosphonate
  modified_base 2: mod_base = OTHER; note = 2'-deoxy-2'-fluorouridine-3'-phosphorothioate
  modified_base 3: mod_base = OTHER; note = 2'-O-methylcytidine-3'-phosphate
  modified_base 4: mod_base = OTHER; note = 2'-O-methylcytidine-3'-phosphate
  modified_base 5: mod_base = OTHER; note = 2'-O-methyluridine-3'-phosphate
  modified_base 6: mod_base = OTHER; note = 2'-deoxy-2'-fluorocytidine-3'-phosphate
  modified_base 7: mod_base = OTHER; note = 2'-O-methylcytidine-3'-phosphate
  modified_base 8: mod_base = OTHER; note = 2'-deoxy-2'-fluorouridine-3'-phosphate
  modified_base 9: mod_base = OTHER; note = 2'-deoxy-2'-fluoroguanosine-3'-phosphate
  modified_base 10: mod_base = OTHER; note = 2'-O-methyladenosine-3'-phosphate
  modified_base 11: mod_base = OTHER; note = 2'-O-methylcytidine-3'-phosphate
  modified_base 12: mod_base = OTHER; note = 2'-O-methyladenosine-3'-phosphate
  modified_base 13: mod_base = OTHER; note = 2'-O-methyluridine-3'-phosphate
  modified_base 14: mod_base = OTHER; note = 2'-deoxy-2'-fluorouridine-3'-phosphate
  modified_base 15: mod_base = OTHER; note = 2'-O-methylguanosine-3'-phosphate
  modified_base 16: mod_base = OTHER; note = 2'-deoxy-2'-fluorocytidine-3'-phosphate
  modified_base 17: mod_base = OTHER; note = 2'-O-methyladenosine-3'-phosphate
  modified_base 18: mod_base = OTHER; note = 2'-O-methylcytidine-3'-phosphate
  modified_base 19: mod_base = OTHER; note = 2'-O-methylcytidine-3'-phosphate
  modified_base 20: mod_base = OTHER; note = 2'-O-methylguanosine-3'-phosphate
  modified_base 21: mod_base = OTHER; note = 2'-O-methyluridine-3'-phosphorothioate
  modified_base 22: mod_base = OTHER; note = 2'-O-methyluridine-3'-phosphorothioate
  modified_base 23: mod_base = OTHER; note = 2'-O-methylguanosine
ttcctcctgacattgcaccgttg

SEQ ID NO: 2943 - RNA, 23 nt, synthetic construct
  source 1..23: mol_type = other RNA
  modified_base 1: mod_base = OTHER; note = 2'-O-methyluridine-3'-phosphorothioate 5'-(E)-Vinylphosphonate
  modified_base 2: mod_base = OTHER; note = 2'-deoxy-2'-fluoroguanosine-3'-phosphorothioate
  modified_base 3: mod_base = OTHER; note = 2'-O-methyladenosine-3'-phosphate
  modified_base 4: mod_base = OTHER; note = 2'-O-methylcytidine-3'-phosphate
  modified_base 5: mod_base = OTHER; note = 2'-O-methyladenosine-3'-phosphate
  modified_base 6: mod_base = OTHER; note = 2'-deoxy-2'-fluoroguanosine-3'-phosphate
  modified_base 7: mod_base = OTHER; note = 2'-O-methylguanosine-3'-phosphate
  modified_base 8: mod_base = OTHER; note = 2'-deoxy-2'-fluorouridine-3'-phosphate
  modified_base 9: mod_base = OTHER; note = 2'-deoxy-2'-fluoroadenosine-3'-phosphate
  modified_base 10: mod_base = OTHER; note = 2'-O-methylguanosine-3'-phosphate
  modified_base 11: mod_base = OTHER; note = 2'-O-methyluridine-3'-phosphate
  modified_base 12: mod_base = OTHER; note = 2'-O-methyladenosine-3'-phosphate
  modified_base 13: mod_base = OTHER; note = 2'-O-methyluridine-3'-phosphate
  modified_base 14: mod_base = OTHER; note = 2'-deoxy-2'-fluorouridine-3'-phosphate
  modified_base 15: mod_base = OTHER; note = 2'-O-methylguanosine-3'-phosphate
  modified_base 16: mod_base = OTHER; note = 2'-deoxy-2'-fluorouridine-3'-phosphate
  modified_base 17: mod_base = OTHER; note = 2'-O-methyluridine-3'-phosphate
  modified_base 18: mod_base = OTHER; note = 2'-O-methylguanosine-3'-phosphate
  modified_base 19: mod_base = OTHER; note = 2'-O-methylcytidine-3'-phosphate
  modified_base 20: mod_base = OTHER; note = 2'-O-methyladenosine-3'-phosphate
  modified_base 21: mod_base = OTHER; note = 2'-O-methylguanosine-3'-phosphorothioate
  modified_base 22: mod_base = OTHER; note = 2'-O-methylguanosine-3'-phosphorothioate
  modified_base 23: mod_base = OTHER; note = 2'-O-methylcytidine
tgacaggtagtattgttgcaggc

SEQ ID NO: 2944 - RNA, 23 nt, synthetic construct
  source 1..23: mol_type = other RNA
  modified_base 1: mod_base = OTHER; note = 2'-O-methyluridine-3'-phosphorothioate 5'-(E)-Vinylphosphonate
  modified_base 2: mod_base = OTHER; note = 2'-deoxy-2'-fluorocytidine-3'-phosphorothioate
  modified_base 3: mod_base = OTHER; note = 2'-O-methyluridine-3'-phosphate
  modified_base 4: mod_base = OTHER; note = 2'-O-methylcytidine-3'-phosphate
  modified_base 5: mod_base = OTHER; note = 2'-O-methyluridine-3'-phosphate
  modified_base 6: mod_base = OTHER; note = 2'-deoxy-2'-fluorocytidine-3'-phosphate
  modified_base 7: mod_base = OTHER; note = 2'-O-methyluridine-3'-phosphate
  modified_base 8: mod_base = OTHER; note = 2'-deoxy-2'-fluorouridine-3'-phosphate
  modified_base 9: mod_base = OTHER; note = 2'-deoxy-2'-fluoroguanosine-3'-phosphate
  modified_base 10: mod_base = OTHER; note = 2'-O-methyluridine-3'-phosphate
  modified_base 11: mod_base = OTHER; note = 2'-O-methyladenosine-3'-phosphate
  modified_base 12: mod_base = OTHER; note = 2'-O-methylcytidine-3'-phosphate
  modified_base 13: mod_base = OTHER; note = 2'-O-methyluridine-3'-phosphate
  modified_base 14: mod_base = OTHER; note = 2'-deoxy-2'-fluorocytidine-3'-phosphate
  modified_base 15: mod_base = OTHER; note = 2'-O-methyladenosine-3'-phosphate
  modified_base 16: mod_base = OTHER; note = 2'-deoxy-2'-fluoroadenosine-3'-phosphate
  modified_base 17: mod_base = OTHER; note = 2'-O-methyladenosine-3'-phosphate
  modified_base 18: mod_base = OTHER; note = 2'-O-methylguanosine-3'-phosphate
  modified_base 19: mod_base = OTHER; note = 2'-O-methylcytidine-3'-phosphate
  modified_base 20: mod_base = OTHER; note = 2'-O-methylcytidine-3'-phosphate
  modified_base 21: mod_base = OTHER; note = 2'-O-methylcytidine-3'-phosphorothioate
  modified_base 22: mod_base = OTHER; note = 2'-O-methyluridine-3'-phosphorothioate
  modified_base 23: mod_base = OTHER; note = 2'-O-methylguanosine
tctctcttgtactcaaagccctg

SEQ ID NO: 2945 - RNA, 23 nt, synthetic construct
  source 1..23: mol_type = other RNA
  modified_base 1: mod_base = OTHER; note = 2'-O-methyluridine-3'-phosphorothioate 5'-(E)-Vinylphosphonate
  modified_base 2: mod_base = OTHER; note = 2'-deoxy-2'-fluorocytidine-3'-phosphorothioate
  modified_base 3: mod_base = OTHER; note = 2'-O-methyladenosine-3'-phosphate
  modified_base 4: mod_base = OTHER; note = 2'-O-methylguanosine-3'-phosphate
  modified_base 5: mod_base = OTHER; note = 2'-O-methylguanosine-3'-phosphate
  modified_base 6: mod_base = OTHER; note = 2'-deoxy-2'-fluorouridine-3'-phosphate
  modified_base 7: mod_base = OTHER; note = 2'-O-methyluridine-3'-phosphate
  modified_base 8: mod_base = OTHER; note = 2'-deoxy-2'-fluorouridine-3'-phosphate
  modified_base 9: mod_base = OTHER; note = 2'-deoxy-2'-fluorocytidine-3'-phosphate
  modified_base 10: mod_base = OTHER; note = 2'-O-methyladenosine-3'-phosphate
  modified_base 11: mod_base = OTHER; note = 2'-O-methyluridine-3'-phosphate
  modified_base 12: mod_base = OTHER; note = 2'-O-methyluridine-3'-phosphate
  modified_base 13: mod_base = OTHER; note = 2'-O-methylcytidine-3'-phosphate
  modified_base 14: mod_base = OTHER; note = 2'-deoxy-2'-fluoroadenosine-3'-phosphate
  modified_base 15: mod_base = OTHER; note = 2'-O-methylguanosine-3'-phosphate
  modified_base 16: mod_base = OTHER; note = 2'-deoxy-2'-fluorocytidine-3'-phosphate
  modified_base 17: mod_base = OTHER; note = 2'-O-methyluridine-3'-phosphate
  modified_base 18: mod_base = OTHER; note = 2'-O-methylguanosine-3'-phosphate
  modified_base 19: mod_base = OTHER; note = 2'-O-methylguanosine-3'-phosphate
  modified_base 20: mod_base = OTHER; note = 2'-O-methyladenosine-3'-phosphate
  modified_base 21: mod_base = OTHER; note = 2'-O-methylcytidine-3'-phosphorothioate
  modified_base 22: mod_base = OTHER; note = 2'-O-methyluridine-3'-phosphorothioate
  modified_base 23: mod_base = OTHER; note = 2'-O-methylguanosine
tcaggtttcattcagctggactg

SEQ ID NO: 2946 - RNA, 23 nt, synthetic construct
  source 1..23: mol_type = other RNA
  modified_base 1: mod_base = OTHER; note = 2'-O-methyluridine-3'-phosphorothioate 5'-(E)-Vinylphosphonate
  modified_base 2: mod_base = OTHER; note = 2'-deoxy-2'-fluoroadenosine-3'-phosphorothioate
  modified_base 3: mod_base = OTHER; note = 2'-O-methylguanosine-3'-phosphate
  modified_base 4: mod_base = OTHER; note = 2'-O-methyluridine-3'-phosphate
  modified_base 5: mod_base = OTHER; note = 2'-O-methyluridine-3'-phosphate
  modified_base 6: mod_base = OTHER; note = 2'-deoxy-2'-fluoroguanosine-3'-phosphate
  modified_base 7: mod_base = OTHER; note = 2'-O-methyluridine-3'-phosphate
  modified_base 8: mod_base = OTHER; note = 2'-deoxy-2'-fluorocytidine-3'-phosphate
  modified_base 9: mod_base = OTHER; note = 2'-deoxy-2'-fluorocytidine-3'-phosphate
  modified_base 10: mod_base = OTHER; note = 2'-O-methyladenosine-3'-phosphate
  modified_base 11: mod_base = OTHER; note = 2'-O-methylcytidine-3'-phosphate
  modified_base 12: mod_base = OTHER; note = 2'-O-methyladenosine-3'-phosphate
  modified_base 13: mod_base = OTHER; note = 2'-O-methyluridine-3'-phosphate
  modified_base 14: mod_base = OTHER; note = 2'-deoxy-2'-fluoroguanosine-3'-phosphate
  modified_base 15: mod_base = OTHER; note = 2'-O-methylguanosine-3'-phosphate
  modified_base 16: mod_base = OTHER; note = 2'-deoxy-2'-fluorocytidine-3'-phosphate
  modified_base 17: mod_base = OTHER; note = 2'-O-methyluridine-3'-phosphate
  modified_base 18: mod_base = OTHER; note = 2'-O-methylguanosine-3'-phosphate
  modified_base 19: mod_base = OTHER; note = 2'-O-methyluridine-3'-phosphate
  modified_base 20: mod_base = OTHER; note = 2'-O-methyluridine-3'-phosphate
  modified_base 21: mod_base = OTHER; note = 2'-O-methylguanosine-3'-phosphorothioate
  modified_base 22: mod_base = OTHER; note = 2'-O-methyladenosine-3'-phosphorothioate
  modified_base 23: mod_base = OTHER; note = 2'-O-methylcytidine
tagttgtccacatggctgttgac

SEQ ID NO: 2947 - RNA, 23 nt, synthetic construct
  source 1..23: mol_type = other RNA
  modified_base 1: mod_base = OTHER; note = 2'-O-methyluridine-3'-phosphorothioate 5'-(E)-Vinylphosphonate
  modified_base 2: mod_base = OTHER; note = 2'-deoxy-2'-fluoroadenosine-3'-phosphorothioate
  modified_base 3: mod_base = OTHER; note = 2'-O-methylguanosine-3'-phosphate
  modified_base 4: mod_base = OTHER; note = 2'-O-methylcytidine-3'-phosphate
  modified_base 5: mod_base = OTHER; note = 2'-O-methylcytidine-3'-phosphate
  modified_base 6: mod_base = OTHER; note = 2'-deoxy-2'-fluorouridine-3'-phosphate
  modified_base 7: mod_base = OTHER; note = 2'-O-methylcytidine-3'-phosphate
  modified_base 8: mod_base = OTHER; note = 2'-deoxy-2'-fluoroadenosine-3'-phosphate
  modified_base 9: mod_base = OTHER; note = 2'-deoxy-2'-fluorocytidine-3'-phosphate
  modified_base 10: mod_base = OTHER; note = 2'-O-methyladenosine-3'-phosphate
  modified_base 11: mod_base = OTHER; note = 2'-O-methylguanosine-3'-phosphate
  modified_base 12: mod_base = OTHER; note = 2'-O-methyladenosine-3'-phosphate
  modified_base 13: mod_base = OTHER; note = 2'-O-methylguanosine-3'-phosphate
  modified_base 14: mod_base = OTHER; note = 2'-deoxy-2'-fluoroguanosine-3'-phosphate
  modified_base 15: mod_base = OTHER; note = 2'-O-methyluridine-3'-phosphate
  modified_base 16: mod_base = OTHER; note = 2'-deoxy-2'-fluoroadenosine-3'-phosphate
  modified_base 17: mod_base = OTHER; note = 2'-O-methylcytidine-3'-phosphate
  modified_base 18: mod_base = OTHER; note = 2'-O-methyladenosine-3'-phosphate
  modified_base 19: mod_base = OTHER; note = 2'-O-methylcytidine-3'-phosphate
  modified_base 20: mod_base = OTHER; note = 2'-O-methylguanosine-3'-phosphate
  modified_base 21: mod_base = OTHER; note = 2'-O-methylguanosine-3'-phosphorothioate
  modified_base 22: mod_base = OTHER; note = 2'-O-methyluridine-3'-phosphorothioate
  modified_base 23: mod_base = OTHER; note = 2'-O-methylguanosine
tagcctcacagaggtacacggtg

SEQ ID NO: 2948 - RNA, 23 nt, synthetic construct
  source 1..23: mol_type = other RNA
  modified_base 1: mod_base = OTHER; note = 2'-O-methyluridine-3'-phosphorothioate 5'-(E)-Vinylphosphonate
  modified_base 2: mod_base = OTHER; note = 2'-deoxy-2'-fluoroguanosine-3'-phosphorothioate
  modified_base 3: mod_base = OTHER; note = 2'-O-methyluridine-3'-phosphate
  modified_base 4: mod_base = OTHER; note = 2'-O-methylcytidine-3'-phosphate
  modified_base 5: mod_base = OTHER; note = 2'-O-methyladenosine-3'-phosphate
  modified_base 6: mod_base = OTHER; note = 2'-deoxy-2'-fluoroguanosine-3'-phosphate
  modified_base 7: mod_base = OTHER; note = 2'-O-methylcytidine-3'-phosphate
  modified_base 8: mod_base = OTHER; note = 2'-deoxy-2'-fluoroadenosine-3'-phosphate
  modified_base 9: mod_base = OTHER; note = 2'-deoxy-2'-fluoroadenosine-3'-phosphate
  modified_base 10: mod_base = OTHER; note = 2'-O-methyladenosine-3'-phosphate
  modified_base 11: mod_base = OTHER; note = 2'-O-methyluridine-3'-phosphate
  modified_base 12: mod_base = OTHER; note = 2'-O-methylguanosine-3'-phosphate
  modified_base 13: mod_base = OTHER; note = 2'-O-methylguanosine-3'-phosphate
  modified_base 14: mod_base = OTHER; note = 2'-deoxy-2'-fluoroadenosine-3'-phosphate
  modified_base 15: mod_base = OTHER; note = 2'-O-methylcytidine-3'-phosphate
  modified_base 16: mod_base = OTHER; note = 2'-deoxy-2'-fluorouridine-3'-phosphate
  modified_base 17: mod_base = OTHER; note = 2'-O-methylcytidine-3'-phosphate
  modified_base 18: mod_base = OTHER; note = 2'-O-methylcytidine-3'-phosphate
  modified_base 19: mod_base = OTHER; note = 2'-O-methyladenosine-3'-phosphate
  modified_base 20: mod_base = OTHER; note = 2'-O-methylcytidine-3'-phosphate
  modified_base 21: mod_base = OTHER; note = 2'-O-methylcytidine-3'-phosphorothioate
  modified_base 22: mod_base = OTHER; note = 2'-O-methylcytidine-3'-phosphorothioate
  modified_base 23: mod_base = OTHER; note = 2'-O-methyluridine
tgtcagcaaatggactccaccct

SEQ ID NO: 2949 - RNA, 23 nt, synthetic construct
  source 1..23: mol_type = other RNA
  modified_base 1: mod_base = OTHER; note = 2'-O-methyluridine-3'-phosphorothioate 5'-(E)-Vinylphosphonate
  modified_base 2: mod_base = OTHER; note = 2'-deoxy-2'-fluoroadenosine-3'-phosphorothioate
  modified_base 3: mod_base = OTHER; note = 2'-O-methylguanosine-3'-phosphate
  modified_base 4: mod_base = OTHER; note = 2'-O-methylcytidine-3'-phosphate
  modified_base 5: mod_base = OTHER; note = 2'-O-methyluridine-3'-phosphate
  modified_base 6: mod_base = OTHER; note = 2'-deoxy-2'-fluoroguanosine-3'-phosphate
  modified_base 7: mod_base = OTHER; note = 2'-O-methylguanosine-3'-phosphate
  modified_base 8: mod_base = OTHER; note = 2'-deoxy-2'-fluoroadenosine-3'-phosphate
  modified_base 9: mod_base = OTHER; note = 2'-deoxy-2'-fluorocytidine-3'-phosphate
  modified_base 10: mod_base = OTHER; note = 2'-O-methyladenosine-3'-phosphate
  modified_base 11: mod_base = OTHER; note = 2'-O-methylcytidine-3'-phosphate
  modified_base 12: mod_base = OTHER; note = 2'-O-methyladenosine-3'-phosphate
  modified_base 13: mod_base = OTHER; note = 2'-O-methyluridine-3'-phosphate
  modified_base 14: mod_base = OTHER; note = 2'-deoxy-2'-fluorocytidine-3'-phosphate
  modified_base 15: mod_base = OTHER; note = 2'-O-methyluridine-3'-phosphate
  modified_base 16: mod_base = OTHER; note = 2'-deoxy-2'-fluoroguanosine-3'-phosphate
  modified_base 17: mod_base = OTHER; note = 2'-O-methylguanosine-3'-phosphate
  modified_base 18: mod_base = OTHER; note = 2'-O-methylguanosine-3'-phosphate
  modified_base 19: mod_base = OTHER; note = 2'-O-methylcytidine-3'-phosphate
  modified_base 20: mod_base = OTHER; note = 2'-O-methyladenosine-3'-phosphate
  modified_base 21: mod_base = OTHER; note = 2'-O-methylguanosine-3'-phosphorothioate
  modified_base 22: mod_base = OTHER; note = 2'-O-methylguanosine-3'-phosphorothioate
  modified_base 23: mod_base = OTHER; note = 2'-O-methyladenosine
tagctggacacatctgggcagga

SEQ ID NO: 2950 - RNA, 23 nt, synthetic construct
  source 1..23: mol_type = other RNA
  modified_base 1: mod_base = OTHER; note = 2'-O-methyluridine-3'-phosphorothioate 5'-(E)-Vinylphosphonate
  modified_base 2: mod_base = OTHER; note = 2'-deoxy-2'-fluorocytidine-3'-phosphorothioate
  modified_base 3: mod_base = OTHER; note = 2'-O-methyluridine-3'-phosphate
  modified_base 4: mod_base = OTHER; note = 2'-O-methylcytidine-3'-phosphate
  modified_base 5: mod_base = OTHER; note = 2'-O-methylcytidine-3'-phosphate
  modified_base 6: mod_base = OTHER; note = 2'-deoxy-2'-fluorouridine-3'-phosphate
  modified_base 7: mod_base = OTHER; note = 2'-O-methylcytidine-3'-phosphate
  modified_base 8: mod_base = OTHER; note = 2'-deoxy-2'-fluoroadenosine-3'-phosphate
  modified_base 9: mod_base = OTHER; note = 2'-deoxy-2'-fluorocytidine-3'-phosphate
  modified_base 10: mod_base = OTHER; note = 2'-O-methyladenosine-3'-phosphate
  modified_base 11: mod_base = OTHER; note = 2'-O-methylguanosine-3'-phosphate
  modified_base 12: mod_base = OTHER; note = 2'-O-methylguanosine-3'-phosphate
  modified_base 13: mod_base = OTHER; note = 2'-O-methyladenosine-3'-phosphate
  modified_base 14: mod_base = OTHER; note = 2'-deoxy-2'-fluoroguanosine-3'-phosphate
  modified_base 15: mod_base = OTHER; note = 2'-O-methyluridine-3'-phosphate
  modified_base 16: mod_base = OTHER; note = 2'-deoxy-2'-fluoroadenosine-3'-phosphate
  modified_base 17: mod_base = OTHER; note = 2'-O-methylguanosine-3'-phosphate
  modified_base 18: mod_base = OTHER; note = 2'-O-methylcytidine-3'-phosphate
  modified_base 19: mod_base = OTHER; note = 2'-O-methyladenosine-3'-phosphate
  modified_base 20: mod_base = OTHER; note = 2'-O-methylguanosine-3'-phosphate
  modified_base 21: mod_base = OTHER; note = 2'-O-methylcytidine-3'-phosphorothioate
  modified_base 22: mod_base = OTHER; note = 2'-O-methyladenosine-3'-phosphorothioate
  modified_base 23: mod_base = OTHER; note = 2'-O-methylguanosine
tctcctcacaggagtagcagcag

SEQ ID NO: 2951 - RNA, 23 nt, synthetic construct
  source 1..23: mol_type = other RNA
  modified_base 1: mod_base = OTHER; note = 2'-O-methyluridine-3'-phosphorothioate 5'-(E)-Vinylphosphonate
  modified_base 2: mod_base = OTHER; note = 2'-deoxy-2'-fluorouridine-3'-phosphorothioate
  modified_base 3: mod_base = OTHER; note = 2'-O-methyluridine-3'-phosphate
  modified_base 4: mod_base = OTHER; note = 2'-O-methylguanosine-3'-phosphate
  modified_base 5: mod_base = OTHER; note = 2'-O-methyladenosine-3'-phosphate
  modified_base 6: mod_base = OTHER; note = 2'-deoxy-2'-fluorouridine-3'-phosphate
  modified_base 7: mod_base = OTHER; note = 2'-O-methylguanosine-3'-phosphate
  modified_base 8: mod_base = OTHER; note = 2'-deoxy-2'-fluorocytidine-3'-phosphate
  modified_base 9: mod_base = OTHER; note = 2'-deoxy-2'-fluoroguanosine-3'-phosphate
  modified_base 10: mod_base = OTHER; note = 2'-O-methylguanosine-3'-phosphate
  modified_base 11: mod_base = OTHER; note = 2'-O-methyladenosine-3'-phosphate
  modified_base 12: mod_base = OTHER; note = 2'-O-methylcytidine-3'-phosphate
  modified_base 13: mod_base = OTHER; note = 2'-O-methyluridine-3'-phosphate
  modified_base 14: mod_base = OTHER; note = 2'-deoxy-2'-fluorouridine-3'-phosphate
  modified_base 15: mod_base = OTHER; note = 2'-O-methylguanosine-3'-phosphate
  modified_base 16: mod_base = OTHER; note = 2'-deoxy-2'-fluoroadenosine-3'-phosphate
  modified_base 17: mod_base = OTHER; note = 2'-O-methylcytidine-3'-phosphate
  modified_base 18: mod_base = OTHER; note = 2'-O-methyladenosine-3'-phosphate
  modified_base 19: mod_base = OTHER; note = 2'-O-methylguanosine-3'-phosphate
  modified_base 20: mod_base = OTHER; note = 2'-O-methylguanosine-3'-phosphate
  modified_base 21: mod_base = OTHER; note = 2'-O-methyladenosine-3'-phosphorothioate
  modified_base 22: mod_base = OTHER; note = 2'-O-methylguanosine-3'-phosphorothioate
  modified_base 23: mod_base = OTHER; note = 2'-O-methyluridine
tttgatgcggacttgacaggagt

SEQ ID NO: 2952 - RNA, 23 nt, synthetic construct
  source 1..23: mol_type = other RNA
  modified_base 1: mod_base = OTHER; note = 2'-O-methyluridine-3'-phosphorothioate 5'-(E)-Vinylphosphonate
  modified_base 2: mod_base = OTHER; note = 2'-deoxy-2'-fluorocytidine-3'-phosphorothioate
  modified_base 3: mod_base = OTHER; note = 2'-O-methylcytidine-3'-phosphate
  modified_base 4: mod_base = OTHER; note = 2'-O-methyluridine-3'-phosphate
  modified_base 5: mod_base = OTHER; note = 2'-O-methylguanosine-3'-phosphate
  modified_base 6: mod_base = OTHER; note = 2'-deoxy-2'-fluoroguanosine-3'-phosphate
  modified_base 7: mod_base = OTHER; note = 2'-O-methyluridine-3'-phosphate
  modified_base 8: mod_base = OTHER; note = 2'-deoxy-2'-fluoroguanosine-3'-phosphate
  modified_base 9: mod_base = OTHER; note = 2'-deoxy-2'-fluorocytidine-3'-phosphate
  modified_base 10: mod_base = OTHER; note = 2'-O-methylcytidine-3'-phosphate
  modified_base 11: mod_base = OTHER; note = 2'-O-methyladenosine-3'-phosphate
  modified_base 12: mod_base = OTHER; note = 2'-O-methylcytidine-3'-phosphate
  modified_base 13: mod_base = OTHER; note = 2'-O-methyladenosine-3'-phosphate
  modified_base 14: mod_base = OTHER; note = 2'-deoxy-2'-fluoroguanosine-3'-phosphate
  modified_base 15: mod_base = OTHER; note = 2'-O-methylguanosine-3'-phosphate
  modified_base 16: mod_base = OTHER; note = 2'-deoxy-2'-fluoroadenosine-3'-phosphate
  modified_base 17: mod_base = OTHER; note = 2'-O-methyluridine-3'-phosphate
  modified_base 18: mod_base = OTHER; note = 2'-O-methylguanosine-3'-phosphate
  modified_base 19: mod_base = OTHER; note = 2'-O-methylguanosine-3'-phosphate
  modified_base 20: mod_base = OTHER; note = 2'-O-methyluridine-3'-phosphate
  modified_base 21: mod_base = OTHER; note = 2'-O-methylcytidine-3'-phosphorothioate
  modified_base 22: mod_base = OTHER; note = 2'-O-methylguanosine-3'-phosphorothioate
  modified_base 23: mod_base = OTHER; note = 2'-O-methyluridine
tcctggtgccacaggatggtcgt

SEQ ID NO: 2953 - RNA, 23 nt, synthetic construct
  source 1..23: mol_type = other RNA
  modified_base 1: mod_base = OTHER; note = 2'-O-methyluridine-3'-phosphorothioate 5'-(E)-Vinylphosphonate
  modified_base 2: mod_base = OTHER; note = 2'-deoxy-2'-fluorocytidine-3'-phosphorothioate
  modified_base 3: mod_base = OTHER; note = 2'-O-methylguanosine-3'-phosphate
  modified_base 4: mod_base = OTHER; note = 2'-O-methylcytidine-3'-phosphate
  modified_base 5: mod_base = OTHER; note = 2'-O-methyladenosine-3'-phosphate
  modified_base 6: mod_base = OTHER; note = 2'-deoxy-2'-fluoroguanosine-3'-phosphate
  modified_base 7: mod_base = OTHER; note = 2'-O-methyladenosine-3'-phosphate
  modified_base 8: mod_base = OTHER; note = 2'-deoxy-2'-fluoroadenosine-3'-phosphate
  modified_base 9: mod_base = OTHER; note = 2'-deoxy-2'-fluoroguanosine-3'-phosphate
  modified_base 10: mod_base = OTHER; note = 2'-O-methylguanosine-3'-phosphate
  modified_base 11: mod_base = OTHER; note = 2'-O-methyluridine-3'-phosphate
  modified_base 12: mod_base = OTHER; note = 2'-O-methylguanosine-3'-phosphate
  modified_base 13: mod_base = OTHER; note = 2'-O-methyladenosine-3'-phosphate
  modified_base 14: mod_base = OTHER; note = 2'-deoxy-2'-fluorouridine-3'-phosphate
  modified_base 15: mod_base = OTHER; note = 2'-O-methylguanosine-3'-phosphate
  modified_base 16: mod_base = OTHER; note = 2'-deoxy-2'-fluorouridine-3'-phosphate
  modified_base 17: mod_base = OTHER; note = 2'-O-methyluridine-3'-phosphate
  modified_base 18: mod_base = OTHER; note = 2'-O-methylguanosine-3'-phosphate
  modified_base 19: mod_base = OTHER; note = 2'-O-methyladenosine-3'-phosphate
  modified_base 20: mod_base = OTHER; note = 2'-O-methylcytidine-3'-phosphate
  modified_base 21: mod_base = OTHER; note = 2'-O-methylcytidine-3'-phosphorothioate
  modified_base 22: mod_base = OTHER; note = 2'-O-methyluridine-3'-phosphorothioate
  modified_base 23: mod_base = OTHER; note = 2'-O-methylcytidine
tcgcagaaggtgatgttgacctc

SEQ ID NO: 2954 - RNA, 23 nt, synthetic construct
  source 1..23: mol_type = other RNA
  modified_base 1: mod_base = OTHER; note = 2'-O-methyluridine-3'-phosphorothioate 5'-(E)-Vinylphosphonate
  modified_base 2: mod_base = OTHER; note = 2'-deoxy-2'-fluorocytidine-3'-phosphorothioate
  modified_base 3: mod_base = OTHER; note = 2'-O-methyluridine-3'-phosphate
  modified_base 4: mod_base = OTHER; note = 2'-O-methylcytidine-3'-phosphate
  modified_base 5: mod_base = OTHER; note = 2'-O-methyluridine-3'-phosphate
  modified_base 6: mod_base = OTHER; note = 2'-deoxy-2'-fluoroguanosine-3'-phosphate
  modified_base 7: mod_base = OTHER; note = 2'-O-methylcytidine-3'-phosphate
  modified_base 8: mod_base = OTHER; note = 2'-deoxy-2'-fluorouridine-3'-phosphate
  modified_base 9: mod_base = OTHER; note = 2'-deoxy-2'-fluoroguanosine-3'-phosphate
  modified_base 10: mod_base = OTHER; note = 2'-O-methyladenosine-3'-phosphate
  modified_base 11: mod_base = OTHER; note = 2'-O-methylguanosine-3'-phosphate
  modified_base 12: mod_base = OTHER; note = 2'-O-methyluridine-3'-phosphate
  modified_base 13: mod_base = OTHER; note = 2'-O-methyladenosine-3'-phosphate
  modified_base 14: mod_base = OTHER; note = 2'-deoxy-2'-fluorocytidine-3'-phosphate
  modified_base 15: mod_base = OTHER; note = 2'-O-methyluridine-3'-phosphate
  modified_base 16: mod_base = OTHER; note = 2'-deoxy-2'-fluorouridine-3'-phosphate
  modified_base 17: mod_base = OTHER; note = 2'-O-methylguanosine-3'-phosphate
  modified_base 18: mod_base = OTHER; note = 2'-O-methylguanosine-3'-phosphate
  modified_base 19: mod_base = OTHER; note = 2'-O-methyladenosine-3'-phosphate
  modified_base 20: mod_base = OTHER; note = 2'-O-methylcytidine-3'-phosphate
  modified_base 21: mod_base = OTHER; note = 2'-O-methylguanosine-3'-phosphorothioate
  modified_base 22: mod_base = OTHER; note = 2'-O-methylcytidine-3'-phosphorothioate
  modified_base 23: mod_base = OTHER; note = 2'-O-methyluridine
tctctgctgagtacttggacgct

SEQ ID NO: 2955 - RNA, 23 nt, synthetic construct
  source 1..23: mol_type = other RNA
  modified_base 1: mod_base = OTHER; note = 2'-O-methyluridine-3'-phosphorothioate 5'-(E)-Vinylphosphonate
  modified_base 2: mod_base = OTHER; note = 2'-deoxy-2'-fluorocytidine-3'-phosphorothioate
  modified_base 3: mod_base = OTHER; note = 2'-O-methyladenosine-3'-phosphate
  modified_base 4: mod_base = OTHER; note = 2'-O-methylguanosine-3'-phosphate
  modified_base 5: mod_base = OTHER; note = 2'-O-methylguanosine-3'-phosphate
  modified_base 6: mod_base = OTHER; note = 2'-deoxy-2'-fluorouridine-3'-phosphate
  modified_base 7: mod_base = OTHER; note = 2'-O-methylguanosine-3'-phosphate
  modified_base 8: mod_base = OTHER; note = 2'-deoxy-2'-fluorocytidine-3'-phosphate
  modified_base 9: mod_base = OTHER; note = 2'-deoxy-2'-fluoroadenosine-3'-phosphate
  modified_base 10: mod_base = OTHER; note = 2'-O-methylcytidine-3'-phosphate
  modified_base 11: mod_base = OTHER; note = 2'-O-methyluridine-3'-phosphate
  modified_base 12: mod_base = OTHER; note = 2'-O-methylguanosine-3'-phosphate
  modified_base 13: mod_base = OTHER; note = 2'-O-methylguanosine-3'-phosphate
  modified_base 14: mod_base = OTHER; note = 2'-deoxy-2'-fluorouridine-3'-phosphate
  modified_base 15: mod_base = OTHER; note = 2'-O-methylguanosine-3'-phosphate
  modified_base 16: mod_base = OTHER; note = 2'-deoxy-2'-fluorocytidine-3'-phosphate
  modified_base 17: mod_base = OTHER; note = 2'-O-methyluridine-3'-phosphate
  modified_base 18: mod_base = OTHER; note = 2'-O-methylguanosine-3'-phosphate
  modified_base 19: mod_base = OTHER; note = 2'-O-methylcytidine-3'-phosphate
  modified_base 20: mod_base = OTHER; note = 2'-O-methyladenosine-3'-phosphate
  modified_base 21: mod_base = OTHER; note = 2'-O-methyluridine-3'-phosphorothioate
  modified_base 22: mod_base = OTHER; note = 2'-O-methylguanosine-3'-phosphorothioate
  modified_base 23: mod_base = OTHER; note = 2'-O-methylguanosine
tcaggtgcactggtgctgcatgg

SEQ ID NO: 2956 - RNA, 23 nt, synthetic construct
  source 1..23: mol_type = other RNA
  modified_base 1: mod_base = OTHER; note = 2'-O-methyluridine-3'-phosphorothioate 5'-(E)-Vinylphosphonate
  modified_base 2: mod_base = OTHER; note = 2'-deoxy-2'-fluorocytidine-3'-phosphorothioate
  modified_base 3: mod_base = OTHER; note = 2'-O-methylguanosine-3'-phosphate
  modified_base 4: mod_base = OTHER; note = 2'-O-methyluridine-3'-phosphate
  modified_base 5: mod_base = OTHER; note = 2'-O-methyluridine-3'-phosphate
  modified_base 6: mod_base = OTHER; note = 2'-deoxy-2'-fluoroadenosine-3'-phosphate
  modified_base 7: mod_base = OTHER; note = 2'-O-methylguanosine-3'-phosphate
  modified_base 8: mod_base = OTHER; note = 2'-deoxy-2'-fluoroguanosine-3'-phosphate
  modified_base 9: mod_base = OTHER; note = 2'-deoxy-2'-fluoroadenosine-3'-phosphate
  modified_base 10: mod_base = OTHER; note = 2'-O-methylcytidine-3'-phosphate
  modified_base 11: mod_base = OTHER; note = 2'-O-methyladenosine-3'-phosphate
  modified_base 12: mod_base = OTHER; note = 2'-O-methylguanosine-3'-phosphate
  modified_base 13: mod_base = OTHER; note = 2'-O-methyluridine-3'-phosphate
  modified_base 14: mod_base = OTHER; note = 2'-deoxy-2'-fluoroguanosine-3'-phosphate
  modified_base 15: mod_base = OTHER; note = 2'-O-methylcytidine-3'-phosphate
  modified_base 16: mod_base = OTHER; note = 2'-deoxy-2'-fluoroadenosine-3'-phosphate
  modified_base 17: mod_base = OTHER; note = 2'-O-methyladenosine-3'-phosphate
  modified_base 18: mod_base = OTHER; note = 2'-O-methylguanosine-3'-phosphate
  modified_base 19: mod_base = OTHER; note = 2'-O-methylguanosine-3'-phosphate
  modified_base 20: mod_base = OTHER; note = 2'-O-methylguanosine-3'-phosphate
  modified_base 21: mod_base = OTHER; note = 2'-O-methylcytidine-3'-phosphorothioate
  modified_base 22: mod_base = OTHER; note = 2'-O-methyladenosine-3'-phosphorothioate
  modified_base 23: mod_base = OTHER; note = 2'-O-methylcytidine
tcgttaggacagtgcaagggcac

SEQ ID NO: 2957 - RNA, 23 nt, synthetic construct
  source 1..23: mol_type = other RNA
  modified_base 1: mod_base = OTHER; note = 2'-O-methyluridine-3'-phosphorothioate 5'-(E)-Vinylphosphonate
  modified_base 2: mod_base = OTHER; note = 2'-deoxy-2'-fluoroadenosine-3'-phosphorothioate
  modified_base 3: mod_base = OTHER; note = 2'-O-methylcytidine-3'-phosphate
  modified_base 4: mod_base = OTHER; note = 2'-O-methylguanosine-3'-phosphate
  modified_base 5: mod_base = OTHER; note = 2'-O-methyluridine-3'-phosphate
  modified_base 6: mod_base = OTHER; note = 2'-deoxy-2'-fluoroguanosine-3'-phosphate
  modified_base 7: mod_base = OTHER; note = 2'-O-methylguanosine-3'-phosphate
  modified_base 8: mod_base = OTHER; note = 2'-deoxy-2'-fluoroguanosine-3'-phosphate
  modified_base 9: mod_base = OTHER; note = 2'-deoxy-2'-fluorouridine-3'-phosphate
  modified_base 10: mod_base = OTHER; note = 2'-O-methylguanosine-3'-phosphate
  modified_base 11: mod_base = OTHER; note = 2'-O-methyluridine-3'-phosphate
  modified_base 12: mod_base = OTHER; note = 2'-O-methyladenosine-3'-phosphate
  modified_base 13: mod_base = OTHER; note = 2'-O-methylguanosine-3'-phosphate
  modified_base 14: mod_base = OTHER; note = 2'-deoxy-2'-fluoroguanosine-3'-phosphate
  modified_base 15: mod_base = OTHER; note = 2'-O-methyluridine-3'-phosphate
  modified_base 16: mod_base = OTHER; note = 2'-deoxy-2'-fluoroguanosine-3'-phosphate
  modified_base 17: mod_base = OTHER; note = 2'-O-methyluridine-3'-phosphate
  modified_base 18: mod_base = OTHER; note = 2'-O-methylguanosine-3'-phosphate
  modified_base 19: mod_base = OTHER; note = 2'-O-methylcytidine-3'-phosphate
  modified_base 20: mod_base = OTHER; note = 2'-O-methyladenosine-3'-phosphate
  modified_base 21: mod_base = OTHER; note = 2'-O-methylguanosine-3'-phosphorothioate
  modified_base 22: mod_base = OTHER; note = 2'-O-methylguanosine-3'-phosphorothioate
  modified_base 23: mod_base = OTHER; note = 2'-O-methyladenosine
tacgtgggtgtaggtgtgcagga

SEQ ID NO: 2958 - RNA, 23 nt, synthetic construct
  source 1..23: mol_type = other RNA
  modified_base 1: mod_base = OTHER; note = 2'-O-methyluridine-3'-phosphorothioate 5'-(E)-Vinylphosphonate
  modified_base 2: mod_base = OTHER; note = 2'-deoxy-2'-fluoroadenosine-3'-phosphorothioate
  modified_base 3: mod_base = OTHER; note = 2'-O-methylguanosine-3'-phosphate
  modified_base 4: mod_base = OTHER; note = 2'-O-methylguanosine-3'-phosphate
  modified_base 5: mod_base = OTHER; note = 2'-O-methylguanosine-3'-phosphate
  modified_base 6: mod_base = OTHER; note = 2'-deoxy-2'-fluoroadenosine-3'-phosphate
  modified_base 7: mod_base = OTHER; note = 2'-O-methylcytidine-3'-phosphate
  modified_base 8: mod_base = OTHER; note = 2'-deoxy-2'-fluoroadenosine-3'-phosphate
  modified_base 9: mod_base = OTHER; note = 2'-deoxy-2'-fluorocytidine-3'-phosphate
  modified_base 10: mod_base = OTHER; note = 2'-O-methyladenosine-3'-phosphate
  modified_base 11: mod_base = OTHER; note = 2'-O-methylguanosine-3'-phosphate
  modified_base 12: mod_base = OTHER; note = 2'-O-methyladenosine-3'-phosphate
  modified_base 13: mod_base = OTHER; note = 2'-O-methyladenosine-3'-phosphate
  modified_base 14: mod_base = OTHER; note = 2'-deoxy-2'-fluoroguanosine-3'-phosphate
  modified_base 15: mod_base = OTHER; note = 2'-O-methylguanosine-3'-phosphate
  modified_base 16: mod_base = OTHER; note = 2'-deoxy-2'-fluoroguanosine-3'-phosphate
  modified_base 17: mod_base = OTHER; note = 2'-O-methylcytidine-3'-phosphate
  modified_base 18: mod_base = OTHER; note = 2'-O-methylguanosine-3'-phosphate
  modified_base 19: mod_base = OTHER; note = 2'-O-methyluridine-3'-phosphate
  modified_base 20: mod_base = OTHER; note = 2'-O-methylguanosine-3'-phosphate
  modified_base 21: mod_base = OTHER; note = 2'-O-methylcytidine-3'-phosphorothioate
  modified_base 22: mod_base = OTHER; note = 2'-O-methyladenosine-3'-phosphorothioate
  modified_base 23: mod_base = OTHER; note = 2'-O-methylguanosine
tagggacacagaagggcgtgcag

SEQ ID NO: 2959 - RNA, 23 nt, synthetic construct
  source 1..23: mol_type = other RNA
  modified_base 1: mod_base = OTHER; note = 2'-O-methyluridine-3'-phosphorothioate 5'-(E)-Vinylphosphonate
  modified_base 2: mod_base = OTHER; note = 2'-deoxy-2'-fluoroguanosine-3'-phosphorothioate
  modified_base 3: mod_base = OTHER; note = 2'-O-methyladenosine-3'-phosphate
  modified_base 4: mod_base = OTHER; note = 2'-O-methyladenosine-3'-phosphate
  modified_base 5: mod_base = OTHER; note = 2'-O-methylcytidine-3'-phosphate
  modified_base 6: mod_base = OTHER; note = 2'-deoxy-2'-fluoroguanosine-3'-phosphate
  modified_base 7: mod_base = OTHER; note = 2'-O-methyluridine-3'-phosphate
  modified_base 8: mod_base = OTHER; note = 2'-deoxy-2'-fluorouridine-3'-phosphate
  modified_base 9: mod_base = OTHER; note = 2'-deoxy-2'-fluorocytidine-3'-phosphate
  modified_base 10: mod_base = OTHER; note = 2'-O-methyluridine-3'-phosphate
  modified_base 11: mod_base = OTHER; note = 2'-O-methylcytidine-3'-phosphate
  modified_base 12: mod_base = OTHER; note = 2'-O-methyladenosine-3'-phosphate
  modified_base 13: mod_base = OTHER; note = 2'-O-methylguanosine-3'-phosphate
  modified_base 14: mod_base = OTHER; note = 2'-deoxy-2'-fluoroadenosine-3'-phosphate
  modified_base 15: mod_base = OTHER; note = 2'-O-methylcytidine-3'-phosphate
  modified_base 16: mod_base = OTHER; note = 2'-deoxy-2'-fluoroadenosine-3'-phosphate
  modified_base 17: mod_base = OTHER; note = 2'-O-methylguanosine-3'-phosphate
  modified_base 18: mod_base = OTHER; note = 2'-O-methylcytidine-3'-phosphate
  modified_base 19: mod_base = OTHER; note = 2'-O-methyladenosine-3'-phosphate
  modified_base 20: mod_base = OTHER; note = 2'-O-methylguanosine-3'-phosphate
  modified_base 21: mod_base = OTHER; note = 2'-O-methyluridine-3'-phosphorothioate
  modified_base 22: mod_base = OTHER; note = 2'-O-methylguanosine-3'-phosphorothioate
  modified_base 23: mod_base = OTHER; note = 2'-O-methylguanosine
tgaacgttctcagacagcagtgg

SEQ ID NO: 2960 - RNA, 23 nt, synthetic construct
  source 1..23: mol_type = other RNA
  modified_base 1: mod_base = OTHER; note = 2'-O-methyluridine-3'-phosphorothioate 5'-(E)-Vinylphosphonate
  modified_base 2: mod_base = OTHER; note = 2'-deoxy-2'-fluorocytidine-3'-phosphorothioate
  modified_base 3: mod_base = OTHER; note = 2'-O-methyluridine-3'-phosphate
  modified_base 4: mod_base = OTHER; note = 2'-O-methylcytidine-3'-phosphate
  modified_base 5: mod_base = OTHER; note = 2'-O-methylcytidine-3'-phosphate
  modified_base 6: mod_base = OTHER; note = 2'-deoxy-2'-fluoroadenosine-3'-phosphate
  modified_base 7: mod_base = OTHER; note = 2'-O-methylguanosine-3'-phosphate
  modified_base 8: mod_base = OTHER; note = 2'-deoxy-2'-fluoroguanosine-3'-phosphate
  modified_base 9: mod_base = OTHER; note = 2'-deoxy-2'-fluorouridine-3'-phosphate
  modified_base 10: mod_base = OTHER; note = 2'-O-methylguanosine-3'-phosphate
  modified_base 11: mod_base = OTHER; note = 2'-O-methylguanosine-3'-phosphate
  modified_base 12: mod_base = OTHER; note = 2'-O-methyladenosine-3'-phosphate
  modified_base 13: mod_base = OTHER; note = 2'-O-methylcytidine-3'-phosphate
  modified_base 14: mod_base = OTHER; note = 2'-deoxy-2'-fluoroadenosine-3'-phosphate
  modified_base 15: mod_base = OTHER; note = 2'-O-methylguanosine-3'-phosphate
  modified_base 16: mod_base = OTHER; note = 2'-deoxy-2'-fluoroadenosine-3'-phosphate
  modified_base 17: mod_base = OTHER; note = 2'-O-methylguanosine-3'-phosphate
  modified_base 18: mod_base = OTHER; note = 2'-O-methylcytidine-3'-phosphate
  modified_base 19: mod_base = OTHER; note = 2'-O-methyladenosine-3'-phosphate
  modified_base 20: mod_base = OTHER; note = 2'-O-methyluridine-3'-phosphate
  modified_base 21: mod_base = OTHER; note = 2'-O-methylguanosine-3'-phosphorothioate
  modified_base 22: mod_base = OTHER; note = 2'-O-methylguanosine-3'-phosphorothioate
  modified_base 23: mod_base = OTHER; note = 2'-O-methylguanosine
tctccaggtggacagagcatggg

SEQ ID NO: 2961 - RNA, 23 nt, synthetic construct
  source 1..23: mol_type = other RNA
  modified_base 1: mod_base = OTHER; note = 2'-O-methyluridine-3'-phosphorothioate 5'-(E)-Vinylphosphonate
  modified_base 2: mod_base = OTHER; note = 2'-deoxy-2'-fluorouridine-3'-phosphorothioate
  modified_base 3: mod_base = OTHER; note = 2'-O-methyluridine-3'-phosphate
  modified_base 4: mod_base = OTHER; note = 2'-O-methyluridine-3'-phosphate
  modified_base 5: mod_base = OTHER; note = 2'-O-methyluridine-3'-phosphate
  modified_base 6: mod_base = OTHER; note = 2'-deoxy-2'-fluorocytidine-3'-phosphate
  modified_base 7: mod_base = OTHER; note = 2'-O-methyladenosine-3'-phosphate
  modified_base 8: mod_base = OTHER; note = 2'-deoxy-2'-fluorouridine-3'-phosphate
  modified_base 9: mod_base = OTHER; note = 2'-deoxy-2'-fluoroguanosine-3'-phosphate
  modified_base 10: mod_base = OTHER; note = 2'-O-methyladenosine-3'-phosphate
  modified_base 11: mod_base = OTHER; note = 2'-O-methyluridine-3'-phosphate
  modified_base 12: mod_base = OTHER; note = 2'-O-methylcytidine-3'-phosphate
  modified_base 13: mod_base = OTHER; note = 2'-O-methyladenosine-3'-phosphate
  modified_base 14: mod_base = OTHER; note = 2'-deoxy-2'-fluoroguanosine-3'-phosphate
  modified_base 15: mod_base = OTHER; note = 2'-O-methyladenosine-3'-phosphate
  modified_base 16: mod_base = OTHER; note = 2'-deoxy-2'-fluorocytidine-3'-phosphate
  modified_base 17: mod_base = OTHER; note = 2'-O-methyladenosine-3'-phosphate
  modified_base 18: mod_base = OTHER; note = 2'-O-methyladenosine-3'-phosphate
  modified_base 19: mod_base = OTHER; note = 2'-O-methyluridine-3'-phosphate
  modified_base 20: mod_base = OTHER; note = 2'-O-methylguanosine-3'-phosphate
  modified_base 21: mod_base = OTHER; note = 2'-O-methylcytidine-3'-phosphorothioate
  modified_base 22: mod_base = OTHER; note = 2'-O-methyladenosine-3'-phosphorothioate
  modified_base 23: mod_base = OTHER; note = 2'-O-methylcytidine
tttttcatgatcagacaatgcac

SEQ ID NO: 2962 - RNA, 23 nt, synthetic construct
  source 1..23: mol_type = other RNA
  modified_base 1: mod_base = OTHER; note = 2'-O-methyluridine-3'-phosphorothioate 5'-(E)-Vinylphosphonate
  modified_base 2: mod_base = OTHER; note = 2'-deoxy-2'-fluorouridine-3'-phosphorothioate
  modified_base 3: mod_base = OTHER; note = 2'-O-methyladenosine-3'-phosphate
  modified_base 4: mod_base = OTHER; note = 2'-O-methylguanosine-3'-phosphate
  modified_base 5: mod_base = OTHER; note = 2'-O-methylguanosine-3'-phosphate
  modified_base 6: mod_base = OTHER; note = 2'-deoxy-2'-fluoroadenosine-3'-phosphate
  modified_base 7: mod_base = OTHER; note = 2'-O-methylcytidine-3'-phosphate
  modified_base 8: mod_base = OTHER; note = 2'-deoxy-2'-fluorouridine-3'-phosphate
  modified_base 9: mod_base = OTHER; note = 2'-deoxy-2'-fluorocytidine-3'-phosphate
  modified_base 10: mod_base = OTHER; note = 2'-O-methylcytidine-3'-phosphate
  modified_base 11: mod_base = OTHER; note = 2'-O-methyluridine-3'-phosphate
  modified_base 12: mod_base = OTHER; note = 2'-O-methylguanosine-3'-phosphate
  modified_base 13: mod_base = OTHER; note = 2'-O-methyladenosine-3'-phosphate
  modified_base 14: mod_base = OTHER; note = 2'-deoxy-2'-fluoroguanosine-3'-phosphate
  modified_base 15: mod_base = OTHER; note = 2'-O-methyluridine-3'-phosphate
  modified_base 16: mod_base = OTHER; note = 2'-deoxy-2'-fluoroguanosine-3'-phosphate
  modified_base 17: mod_base = OTHER; note = 2'-O-methylguanosine-3'-phosphate
  modified_base 18: mod_base = OTHER; note = 2'-O-methylcytidine-3'-phosphate
  modified_base 19: mod_base = OTHER; note = 2'-O-methylguanosine-3'-phosphate
  modified_base 20: mod_base = OTHER; note = 2'-O-methylcytidine-3'-phosphate
  modified_base 21: mod_base = OTHER; note = 2'-O-methylcytidine-3'-phosphorothioate
  modified_base 22: mod_base = OTHER; note = 2'-O-methylcytidine-3'-phosphorothioate
  modified_base 23: mod_base = OTHER; note = 2'-O-methyluridine
ttaggactcctgagtggcgccct

SEQ ID NO: 2963 - RNA, 23 nt, synthetic construct
  source 1..23: mol_type = other RNA
  modified_base 1: mod_base = OTHER; note = 2'-O-methyluridine-3'-phosphorothioate 5'-(E)-Vinylphosphonate
  modified_base 2: mod_base = OTHER; note = 2'-deoxy-2'-fluoroguanosine-3'-phosphorothioate
  modified_base 3: mod_base = OTHER; note = 2'-O-methyluridine-3'-phosphate
  modified_base 4: mod_base = OTHER; note = 2'-O-methylcytidine-3'-phosphate
  modified_base 5: mod_base = OTHER; note = 2'-O-methylcytidine-3'-phosphate
  modified_base 6: mod_base = OTHER; note = 2'-deoxy-2'-fluorocytidine-3'-phosphate
  modified_base 7: mod_base = OTHER; note = 2'-O-methyladenosine-3'-phosphate
  modified_base 8: mod_base = OTHER; note = 2'-deoxy-2'-fluoroguanosine-3'-phosphate
  modified_base 9: mod_base = OTHER; note = 2'-deoxy-2'-fluorouridine-3'-phosphate
  modified_base 10: mod_base = OTHER; note = 2'-O-methylguanosine-3'-phosphate
  modified_base 11: mod_base = OTHER; note = 2'-O-methyladenosine-3'-phosphate
  modified_base 12: mod_base = OTHER; note = 2'-O-methylcytidine-3'-phosphate
  modified_base 13: mod_base = OTHER; note = 2'-O-methyladenosine-3'-phosphate
  modified_base 14: mod_base = OTHER; note = 2'-deoxy-2'-fluorouridine-3'-phosphate
  modified_base 15: mod_base = OTHER; note = 2'-O-methylcytidine-3'-phosphate
  modified_base 16: mod_base = OTHER; note = 2'-deoxy-2'-fluoroadenosine-3'-phosphate
  modified_base 17: mod_base = OTHER; note = 2'-O-methylguanosine-3'-phosphate
  modified_base 18: mod_base = OTHER; note = 2'-O-methylguanosine-3'-phosphate
  modified_base 19: mod_base = OTHER; note = 2'-O-methylguanosine-3'-phosphate
  modified_base 20: mod_base = OTHER; note = 2'-O-methyladenosine-3'-phosphate
  modified_base 21: mod_base = OTHER; note = 2'-O-methylguanosine-3'-phosphorothioate
  modified_base 22: mod_base = OTHER; note = 2'-O-methylguanosine-3'-phosphorothioate
  modified_base 23: mod_base = OTHER; note = 2'-O-methylguanosine
tgtcccagtgacatcagggaggg

SEQ ID NO: 2964 - RNA, 23 nt, synthetic construct
  source 1..23: mol_type = other RNA
  modified_base 1: mod_base = OTHER; note = 2'-O-methyluridine-3'-phosphorothioate 5'-(E)-Vinylphosphonate
  modified_base 2: mod_base = OTHER; note = 2'-deoxy-2'-fluoroadenosine-3'-phosphorothioate
  modified_base 3: mod_base = OTHER; note = 2'-O-methylcytidine-3'-phosphate
  modified_base 4: mod_base = OTHER; note = 2'-O-methyladenosine-3'-phosphate
  modified_base 5: mod_base = OTHER; note = 2'-O-methyluridine-3'-phosphate
  modified_base 6: mod_base = OTHER; note = 2'-deoxy-2'-fluoroguanosine-3'-phosphate
  modified_base 7: mod_base = OTHER; note = 2'-O-methylcytidine-3'-phosphate
  modified_base 8: mod_base = OTHER; note = 2'-deoxy-2'-fluorouridine-3'-phosphate
  modified_base 9: mod_base = OTHER; note = 2'-deoxy-2'-fluorouridine-3'-phosphate
  modified_base 10: mod_base = OTHER; note = 2'-O-methyladenosine-3'-phosphate
  modified_base 11: mod_base = OTHER; note = 2'-O-methylguanosine-3'-phosphate
  modified_base 12: mod_base = OTHER; note = 2'-O-methyluridine-3'-phosphate
  modified_base 13: mod_base = OTHER; note = 2'-O-methyluridine-3'-phosphate
  modified_base 14: mod_base = OTHER; note = 2'-deoxy-2'-fluorouridine-3'-phosphate
  modified_base 15: mod_base = OTHER; note = 2'-O-methylguanosine-3'-phosphate
  modified_base 16: mod_base = OTHER; note = 2'-deoxy-2'-fluorouridine-3'-phosphate
  modified_base 17: mod_base = OTHER; note = 2'-O-methyluridine-3'-phosphate
  modified_base 18: mod_base = OTHER; note = 2'-O-methylcytidine-3'-phosphate
  modified_base 19: mod_base = OTHER; note = 2'-O-methylcytidine-3'-phosphate
  modified_base 20: mod_base = OTHER; note = 2'-O-methyladenosine-3'-phosphate
  modified_base 21: mod_base = OTHER; note = 2'-O-methylguanosine-3'-phosphorothioate
  modified_base 22: mod_base = OTHER; note = 2'-O-methylguanosine-3'-phosphorothioate
  modified_base 23: mod_base = OTHER; note = 2'-O-methylguanosine
tacatgcttagtttgttccaggg

SEQ ID NO: 2965 - RNA, 23 nt, synthetic construct
  source 1..23: mol_type = other RNA
  modified_base 1: mod_base = OTHER; note = 2'-O-methyluridine-3'-phosphorothioate 5'-(E)-Vinylphosphonate
  modified_base 2: mod_base = OTHER; note = 2'-deoxy-2'-fluorouridine-3'-phosphorothioate
  modified_base 3: mod_base = OTHER; note = 2'-O-methylguanosine-3'-phosphate
  modified_base 4: mod_base = OTHER; note = 2'-O-methylguanosine-3'-phosphate
  modified_base 5: mod_base = OTHER; note = 2'-O-methylcytidine-3'-phosphate
  modified_base 6: mod_base = OTHER; note = 2'-deoxy-2'-fluorocytidine-3'-phosphate
  modified_base 7: mod_base = OTHER; note = 2'-O-methyladenosine-3'-phosphate
  modified_base 8: mod_base = OTHER; note = 2'-deoxy-2'-fluoroguanosine-3'-phosphate
  modified_base 9: mod_base = OTHER; note = 2'-deoxy-2'-fluorocytidine-3'-phosphate
  modified_base 10: mod_base = OTHER; note = 2'-O-methyluridine-3'-phosphate
  modified_base 11: mod_base = OTHER; note = 2'-O-methylguanosine-3'-phosphate
  modified_base 12: mod_base = OTHER; note = 2'-O-methylguanosine-3'-phosphate
  modified_base 13: mod_base = OTHER; note = 2'-O-methyladenosine-3'-phosphate
  modified_base 14: mod_base = OTHER; note = 2'-deoxy-2'-fluoroadenosine-3'-phosphate
  modified_base 15: mod_base = OTHER; note = 2'-O-methyluridine-3'-phosphate
  modified_base 16: mod_base = OTHER; note = 2'-deoxy-2'-fluorocytidine-3'-phosphate
  modified_base 17: mod_base = OTHER; note = 2'-O-methylcytidine-3'-phosphate
  modified_base 18: mod_base = OTHER; note = 2'-O-methylguanosine-3'-phosphate
  modified_base 19: mod_base = OTHER; note = 2'-O-methyluridine-3'-phosphate
  modified_base 20: mod_base = OTHER; note = 2'-O-methylguanosine-3'-phosphate
  modified_base 21: mod_base = OTHER; note = 2'-O-methylcytidine-3'-phosphorothioate
  modified_base 22: mod_base = OTHER; note = 2'-O-methyluridine-3'-phosphorothioate
  modified_base 23: mod_base = OTHER; note = 2'-O-methylguanosine
ttggccagctggaatccgtgctg

SEQ ID NO: 2966 - RNA, 23 nt, synthetic construct
  source 1..23: mol_type = other RNA
  modified_base 1: mod_base = OTHER; note = 2'-O-methyluridine-3'-phosphorothioate 5'-(E)-Vinylphosphonate
  modified_base 2: mod_base = OTHER; note = 2'-deoxy-2'-fluorocytidine-3'-phosphorothioate
  modified_base 3: mod_base = OTHER; note = 2'-O-methyluridine-3'-phosphate
  modified_base 4: mod_base = OTHER; note = 2'-O-methyluridine-3'-phosphate
  modified_base 5: mod_base = OTHER; note = 2'-O-methylguanosine-3'-phosphate
  modified_base 6: mod_base = OTHER; note = 2'-deoxy-2'-fluorocytidine-3'-phosphate
  modified_base 7: mod_base = OTHER; note = 2'-O-methylcytidine-3'-phosphate
  modified_base 8: mod_base = OTHER; note = 2'-deoxy-2'-fluorouridine-3'-phosphate
  modified_base 9: mod_base = OTHER; note = 2'-deoxy-2'-fluoroguanosine-3'-phosphate
  modified_base 10: mod_base = OTHER; note = 2'-O-methylguanosine-3'-phosphate
  modified_base 11: mod_base = OTHER; note = 2'-O-methyladenosine-3'-phosphate
  modified_base 12: mod_base = OTHER; note = 2'-O-methylcytidine-3'-phosphate
  modified_base 13: mod_base = OTHER; note = 2'-O-methylcytidine-3'-phosphate
  modified_base 14: mod_base = OTHER; note = 2'-deoxy-2'-fluoroadenosine-3'-phosphate
  modified_base 15: mod_base = OTHER; note = 2'-O-methylguanosine-3'-phosphate
  modified_base 16: mod_base = OTHER; note = 2'-deoxy-2'-fluorocytidine-3'-phosphate
  modified_base 17: mod_base = OTHER; note = 2'-O-methylcytidine-3'-phosphate
  modified_base 18: mod_base = OTHER; note = 2'-O-methyluridine-3'-phosphate
  modified_base 19: mod_base = OTHER; note = 2'-O-methylguanosine-3'-phosphate
  modified_base 20: mod_base = OTHER; note = 2'-O-methyluridine-3'-phosphate
  modified_base 21: mod_base = OTHER; note = 2'-O-methylcytidine-3'-phosphorothioate
  modified_base 22: mod_base = OTHER; note = 2'-O-methyluridine-3'-phosphorothioate
  modified_base 23: mod_base = OTHER; note = 2'-O-methylguanosine
tcttgcctggaccagcctgtctg

SEQ ID NO: 2967 - RNA, 23 nt, synthetic construct
  source 1..23: mol_type = other RNA
  modified_base 1: mod_base = OTHER; note = 2'-O-methyluridine-3'-phosphorothioate 5'-(E)-Vinylphosphonate
  modified_base 2: mod_base = OTHER; note = 2'-deoxy-2'-fluorouridine-3'-phosphorothioate
  modified_base 3: mod_base = OTHER; note = 2'-O-methylguanosine-3'-phosphate
  modified_base 4: mod_base = OTHER; note = 2'-O-methyluridine-3'-phosphate
  modified_base 5: mod_base = OTHER; note = 2'-O-methylcytidine-3'-phosphate
  modified_base 6: mod_base = OTHER; note = 2'-deoxy-2'-fluoroguanosine-3'-phosphate
  modified_base 7: mod_base = OTHER; note = 2'-O-methylcytidine-3'-phosphate
  modified_base 8: mod_base = OTHER; note = 2'-deoxy-2'-fluoroadenosine-3'-phosphate
  modified_base 9: mod_base = OTHER; note = 2'-deoxy-2'-fluoroguanosine-3'-phosphate
  modified_base 10: mod_base = OTHER; note = 2'-O-methylcytidine-3'-phosphate
  modified_base 11: mod_base = OTHER; note = 2'-O-methyluridine-3'-phosphate
  modified_base 12: mod_base = OTHER; note = 2'-O-methyluridine-3'-phosphate
  modified_base 13: mod_base = OTHER; note = 2'-O-methylcytidine-3'-phosphate
  modified_base 14: mod_base = OTHER; note = 2'-deoxy-2'-fluorocytidine-3'-phosphate
  modified_base 15: mod_base = OTHER; note = 2'-O-methyluridine-3'-phosphate
  modified_base 16: mod_base = OTHER; note = 2'-deoxy-2'-fluoroguanosine-3'-phosphate
  modified_base 17: mod_base = OTHER; note = 2'-O-methylguanosine-3'-phosphate
  modified_base 18: mod_base = OTHER; note = 2'-O-methylcytidine-3'-phosphate
  modified_base 19: mod_base = OTHER; note = 2'-O-methyladenosine-3'-phosphate
  modified_base 20: mod_base = OTHER; note = 2'-O-methylguanosine-3'-phosphate
  modified_base 21: mod_base = OTHER; note = 2'-O-methylcytidine-3'-phosphorothioate
  modified_base 22: mod_base = OTHER; note = 2'-O-methyladenosine-3'-phosphorothioate
  modified_base 23: mod_base = OTHER; note = 2'-O-methylguanosine
ttgtcgcagcttcctggcagcag

SEQ ID NO: 2968 - RNA, 23 nt, synthetic construct
  source 1..23: mol_type = other RNA
  modified_base 1: mod_base = OTHER; note = 2'-O-methyluridine-3'-phosphorothioate 5'-(E)-Vinylphosphonate
  modified_base 2: mod_base = OTHER; note = 2'-deoxy-2'-fluorouridine-3'-phosphorothioate
  modified_base 3: mod_base = OTHER; note = 2'-O-methylcytidine-3'-phosphate
  modified_base 4: mod_base = OTHER; note = 2'-O-methyladenosine-3'-phosphate
  modified_base 5: mod_base = OTHER; note = 2'-O-methylguanosine-3'-phosphate
  modified_base 6: mod_base = OTHER; note = 2'-deoxy-2'-fluorocytidine-3'-phosphate
  modified_base 7: mod_base = OTHER; note = 2'-O-methylcytidine-3'-phosphate
  modified_base 8: mod_base = OTHER; note = 2'-deoxy-2'-fluorocytidine-3'-phosphate
  modified_base 9: mod_base = OTHER; note = 2'-deoxy-2'-fluorouridine-3'-phosphate
  modified_base 10: mod_base = OTHER; note = 2'-O-methylguanosine-3'-phosphate
  modified_base 11: mod_base = OTHER; note = 2'-O-methyladenosine-3'-phosphate
  modified_base 12: mod_base = OTHER; note = 2'-O-methylguanosine-3'-phosphate
  modified_base 13: mod_base = OTHER; note = 2'-O-methyluridine-3'-phosphate
  modified_base 14: mod_base = OTHER; note = 2'-deoxy-2'-fluorouridine-3'-phosphate
  modified_base 15: mod_base = OTHER; note = 2'-O-methyladenosine-3'-phosphate
  modified_base 16: mod_base = OTHER; note = 2'-deoxy-2'-fluorocytidine-3'-phosphate
  modified_base 17: mod_base = OTHER; note = 2'-O-methylcytidine-3'-phosphate
  modified_base 18: mod_base = OTHER; note = 2'-O-methylcytidine-3'-phosphate
  modified_base 19: mod_base = OTHER; note = 2'-O-methyluridine-3'-phosphate
  modified_base 20: mod_base = OTHER; note = 2'-O-methylguanosine-3'-phosphate
  modified_base 21: mod_base = OTHER; note = 2'-O-methylcytidine-3'-phosphorothioate
  modified_base 22: mod_base = OTHER; note = 2'-O-methyladenosine-3'-phosphorothioate
  modified_base 23: mod_base = OTHER; note = 2'-O-methylguanosine
ttcagccctgagttaccctgcag

SEQ ID NO: 2969 - RNA, 23 nt, synthetic construct
  source 1..23: mol_type = other RNA
  modified_base 1: mod_base = OTHER; note = 2'-O-methyluridine-3'-phosphorothioate 5'-(E)-Vinylphosphonate
  modified_base 2: mod_base = OTHER; note = 2'-deoxy-2'-fluorocytidine-3'-phosphorothioate
  modified_base 3: mod_base = OTHER; note = 2'-O-methyluridine-3'-phosphate
  modified_base 4: mod_base = OTHER; note = 2'-O-methylcytidine-3'-phosphate
  modified_base 5: mod_base = OTHER; note = 2'-O-methyluridine-3'-phosphate
  modified_base 6: mod_base = OTHER; note = 2'-deoxy-2'-fluorocytidine-3'-phosphate
  modified_base 7: mod_base = OTHER; note = 2'-O-methyluridine-3'-phosphate
  modified_base 8: mod_base = OTHER; note = 2'-deoxy-2'-fluoroguanosine-3'-phosphate
  modified_base 9: mod_base = OTHER; note = 2'-deoxy-2'-fluoroadenosine-3'-phosphate
  modified_base 10: mod_base = OTHER; note = 2'-O-methylcytidine-3'-phosphate
  modified_base 11: mod_base = OTHER; note = 2'-O-methylcytidine-3'-phosphate
  modified_base 12: mod_base = OTHER; note = 2'-O-methyluridine-3'-phosphate
  modified_base 13: mod_base = OTHER; note = 2'-O-methylguanosine-3'-phosphate
  modified_base 14: mod_base = OTHER; note = 2'-deoxy-2'-fluoroguanosine-3'-phosphate
  modified_base 15: mod_base = OTHER; note = 2'-O-methylcytidine-3'-phosphate
  modified_base 16: mod_base = OTHER; note = 2'-deoxy-2'-fluorocytidine-3'-phosphate
  modified_base 17: mod_base = OTHER; note = 2'-O-methylguanosine-3'-phosphate
  modified_base 18: mod_base = OTHER; note = 2'-O-methyluridine-3'-phosphate
  modified_base 19: mod_base = OTHER; note = 2'-O-methyluridine-3'-phosphate
  modified_base 20: mod_base = OTHER; note = 2'-O-methylguanosine-3'-phosphate
  modified_base 21: mod_base = OTHER; note = 2'-O-methylcytidine-3'-phosphorothioate
  modified_base 22: mod_base = OTHER; note = 2'-O-methylguanosine-3'-phosphorothioate
  modified_base 23: mod_base = OTHER; note = 2'-O-methyladenosine
tctctctgacctggccgttgcga

SEQ ID NO: 2970 - RNA, 23 nt, synthetic construct
  source 1..23: mol_type = other RNA
  modified_base 1: mod_base = OTHER; note = 2'-O-methyluridine-3'-phosphorothioate 5'-(E)-Vinylphosphonate
  modified_base 2: mod_base = OTHER; note = 2'-deoxy-2'-fluorouridine-3'-phosphorothioate
  modified_base 3: mod_base = OTHER; note = 2'-O-methyluridine-3'-phosphate
  modified_base 4: mod_base = OTHER; note = 2'-O-methyluridine-3'-phosphate
  modified_base 5: mod_base = OTHER; note = 2'-O-methyladenosine-3'-phosphate
  modified_base 6: mod_base = OTHER; note = 2'-deoxy-2'-fluorouridine-3'-phosphate
  modified_base 7: mod_base = OTHER; note = 2'-O-methyluridine-3'-phosphate
  modified_base 8: mod_base = OTHER; note = 2'-deoxy-2'-fluorouridine-3'-phosphate
  modified_base 9: mod_base = OTHER; note = 2'-deoxy-2'-fluoroguanosine-3'-phosphate
  modified_base 10: mod_base = OTHER; note = 2'-O-methylcytidine-3'-phosphate
  modified_base 11: mod_base = OTHER; note = 2'-O-methyladenosine-3'-phosphate
  modified_base 12: mod_base = OTHER; note = 2'-O-methyladenosine-3'-phosphate
  modified_base 13: mod_base = OTHER; note = 2'-O-methyladenosine-3'-phosphate
  modified_base 14: mod_base = OTHER; note = 2'-deoxy-2'-fluoroadenosine-3'-phosphate
  modified_base 15: mod_base = OTHER; note = 2'-O-methylcytidine-3'-phosphate
  modified_base 16: mod_base = OTHER; note = 2'-deoxy-2'-fluorouridine-3'-phosphate
  modified_base 17: mod_base = OTHER; note = 2'-O-methylguanosine-3'-phosphate
  modified_base 18: mod_base = OTHER; note = 2'-O-methylguanosine-3'-phosphate
  modified_base 19: mod_base = OTHER; note = 2'-O-methylguanosine-3'-phosphate
  modified_base 20: mod_base = OTHER; note = 2'-O-methylcytidine-3'-phosphate
  modified_base 21: mod_base = OTHER; note = 2'-O-methyluridine-3'-phosphorothioate
  modified_base 22: mod_base = OTHER; note = 2'-O-methylguanosine-3'-phosphorothioate
  modified_base 23: mod_base = OTHER; note = 2'-O-methylguanosine
ttttatttgcaaaactgggctgg

SEQ ID NO: 2971 - RNA, 23 nt, synthetic construct
  source 1..23: mol_type = other RNA
  modified_base 1: mod_base = OTHER; note = 5'-methyluridine-3'-phosphate
  modified_base 3: mod_base = OTHER; note = 5'-methyluridine-3'-phosphate
  modified_base 4: mod_base = OTHER; note = 5'-methyluridine-3'-phosphate
  modified_base 8: mod_base = OTHER; note = 5'-methyluridine-3'-phosphate
  modified_base 10: mod_base = OTHER; note = 5'-methyluridine-3'-phosphate
  modified_base 19: mod_base = OTHER; note = 5'-methyluridine-3'-phosphate
  modified_base 22: mod_base = OTHER; note = 5'-methyluridine-3'-phosphate
tgttggctctggcggccatgctc

SEQ ID NO: 2972 - RNA, 23 nt, synthetic construct
  source 1..23: mol_type = other RNA
  modified_base 4: mod_base = OTHER; note = 5'-methyluridine-3'-phosphate
  modified_base 12: mod_base = OTHER; note = 5'-methyluridine-3'-phosphate
agctgggagaatgcagggcacac

SEQ ID NO: 2973 - RNA, 23 nt, synthetic construct
  source 1..23: mol_type = other RNA
  modified_base 8: mod_base = OTHER; note = 5'-methyluridine-3'-phosphate
  modified_base 13: mod_base = OTHER; note = 5'-methyluridine-3'-phosphate
  modified_base 14: mod_base = OTHER; note = 5'-methyluridine-3'-phosphate
  modified_base 15: mod_base = OTHER; note = 5'-methyluridine-3'-phosphate
  modified_base 17: mod_base = OTHER; note = 5'-methyluridine-3'-phosphate
  modified_base 18: mod_base = OTHER; note = 5'-methyluridine-3'-phosphate
cggcgcgtgagctttgttccacc

SEQ ID NO: 2974 - RNA, 23 nt, synthetic construct
  source 1..23: mol_type = other RNA
  modified_base 3: mod_base = OTHER; note = 5'-methyluridine-3'-phosphate
  modified_base 11: mod_base = OTHER; note = 5'-methyluridine-3'-phosphate
  modified_base 13: mod_base = OTHER; note = 5'-methyluridine-3'-phosphate
  modified_base 22: mod_base = OTHER; note = 5'-methyluridine-3'-phosphate
aatgggcgggtgtgcagcacctg

SEQ ID NO: 2975 - RNA, 23 nt, synthetic construct
  source 1..23: mol_type = other RNA
  modified_base 1: mod_base = OTHER; note = 5'-methyluridine-3'-phosphate
  modified_base 2: mod_base = OTHER; note = 5'-methyluridine-3'-phosphate
  modified_base 7: mod_base = OTHER; note = 5'-methyluridine-3'-phosphate
  modified_base 16: mod_base = OTHER; note = 5'-methyluridine-3'-phosphate
  modified_base 17: mod_base = OTHER; note = 5'-methyluridine-3'-phosphate
ttccactacaagaccttcgacgg

SEQ ID NO: 2976 - RNA, 23 nt, synthetic construct
  source 1..23: mol_type = other RNA
  modified_base 5: mod_base = OTHER; note = 5'-methyluridine-3'-phosphate
  modified_base 6: mod_base = OTHER; note = 5'-methyluridine-3'-phosphate
  modified_base 7: mod_base = OTHER; note = 5'-methyluridine-3'-phosphate
  modified_base 13: mod_base = OTHER; note = 5'-methyluridine-3'-phosphate
  modified_base 17: mod_base = OTHER; note = 5'-methyluridine-3'-phosphate
  modified_base 19: mod_base = OTHER; note = 5'-methyluridine-3'-phosphate
  modified_base 20: mod_base = OTHER; note = 5'-methyluridine-3'-phosphate
  modified_base 22: mod_base = OTHER; note = 5'-methyluridine-3'-phosphate
ggcctttgcaactacgtgttctc

SEQ ID NO: 2977 - RNA, 23 nt, synthetic construct
  source 1..23: mol_type = other RNA
  modified_base 9: mod_base = OTHER; note = 5'-methyluridine-3'-phosphate
  modified_base 10: mod_base = OTHER; note = 5'-methyluridine-3'-phosphate
  modified_base 16: mod_base = OTHER; note = 5'-methyluridine-3'-phosphate
  modified_base 22: mod_base = OTHER; note = 5'-methyluridine-3'-phosphate
acgaggacttcaacgtccagcta

SEQ ID NO: 2978 - RNA, 23 nt, synthetic construct
  source 1..23: mol_type = other RNA
  modified_base 1: mod_base = OTHER; note = 5'-methyluridine-3'-phosphate
  modified_base 8: mod_base = OTHER; note = 5'-methyluridine-3'-phosphate
  modified_base 10: mod_base = OTHER; note = 5'-methyluridine-3'-phosphate
  modified_base 11: mod_base = OTHER; note = 5'-methyluridine-3'-phosphate
  modified_base 13: mod_base = OTHER; note = 5'-methyluridine-3'-phosphate
  modified_base 16: mod_base = OTHER; note = 5'-methyluridine-3'-phosphate
tcacccgtgttgtcatcaaggcc

SEQ ID NO: 2979 - RNA, 23 nt, synthetic construct
  source 1..23: mol_type = other RNA
  modified_base 6: mod_base = OTHER; note = 5'-methyluridine-3'-phosphate
  modified_base 10: mod_base = OTHER; note = 5'-methyluridine-3'-phosphate
  modified_base 13: mod_base = OTHER; note = 5'-methyluridine-3'-phosphate
  modified_base 16: mod_base = OTHER; note = 5'-methyluridine-3'-phosphate
  modified_base 20: mod_base = OTHER; note = 5'-methyluridine-3'-phosphate
acggctccgtcctcatcaatggg

SEQ ID NO: 2980 - RNA, 23 nt, synthetic construct
  source 1..23: mol_type = other RNA
  modified_base 5: mod_base = OTHER; note = 5'-methyluridine-3'-phosphate
  modified_base 9: mod_base = OTHER; note = 5'-methyluridine-3'-phosphate
  modified_base 10: mod_base = OTHER; note = 5'-methyluridine-3'-phosphate
  modified_base 21: mod_base = OTHER; note = 5'-methyluridine-3'-phosphate
gagctgccttacagccgcactgg

SEQ ID NO: 2981 - RNA, 23 nt, synthetic construct
  source 1..23: mol_type = other RNA
  modified_base 6: mod_base = OTHER; note = 5'-methyluridine-3'-phosphate
  modified_base 10: mod_base = OTHER; note = 5'-methyluridine-3'-phosphate
  modified_base 16: mod_base = OTHER; note = 5'-methyluridine-3'-phosphate
  modified_base 22: mod_base = OTHER; note = 5'-methyluridine-3'-phosphate
gggactacatcaaggtcagcatc

SEQ ID NO: 2982 - RNA, 23 nt, synthetic construct
  source 1..23: mol_type = other RNA
  modified_base 2: mod_base = OTHER; note = 5'-methyluridine-3'-phosphate
  modified_base 5: mod_base = OTHER; note = 5'-methyluridine-3'-phosphate
  modified_base 10: mod_base = OTHER; note = 5'-methyluridine-3'-phosphate
  modified_base 11: mod_base = OTHER; note = 5'-methyluridine-3'-phosphate
  modified_base 14: mod_base = OTHER; note = 5'-methyluridine-3'-phosphate
  modified_base 16: mod_base = OTHER; note = 5'-methyluridine-3'-phosphate
gtgctgacattcctgtggaacgg

SEQ ID NO: 2983 - RNA, 23 nt, synthetic construct
  source 1..23: mol_type = other RNA
  modified_base 4: mod_base = OTHER; note = 5'-methyluridine-3'-phosphate
  modified_base 8: mod_base = OTHER; note = 5'-methyluridine-3'-phosphate
  modified_base 15: mod_base = OTHER; note = 5'-methyluridine-3'-phosphate
agctggatcccaaatacgccaac

SEQ ID NO: 2984 - RNA, 23 nt, synthetic construct
  source 1..23: mol_type = other RNA
  modified_base 6: mod_base = OTHER; note = 5'-methyluridine-3'-phosphate
  modified_base 7: mod_base = OTHER; note = 5'-methyluridine-3'-phosphate
  modified_base 15: mod_base = OTHER; note = 5'-methyluridine-3'-phosphate
  modified_base 16: mod_base = OTHER; note = 5'-methyluridine-3'-phosphate
  modified_base 18: mod_base = OTHER; note = 5'-methyluridine-3'-phosphate
  modified_base 20: mod_base = OTHER; note = 5'-methyluridine-3'-phosphate
cggccttcaacgagttctatgcc

SEQ ID NO: 2985 - RNA, 23 nt, synthetic construct
  source 1..23: mol_type = other RNA
  modified_base 7: mod_base = OTHER; note = 5'-methyluridine-3'-phosphate
  modified_base 15: mod_base = OTHER; note = 5'-methyluridine-3'-phosphate
  modified_base 16: mod_base = OTHER; note = 5'-methyluridine-3'-phosphate
  modified_base 20: mod_base = OTHER; note = 5'-methyluridine-3'-phosphate
ggaacctgcagaagttggatggg

SEQ ID NO: 2986 - RNA, 23 nt, synthetic construct
  source 1..23: mol_type = other RNA
  modified_base 3: mod_base = OTHER; note = 5'-methyluridine-3'-phosphate
  modified_base 22: mod_base = OTHER; note = 5'-methyluridine-3'-phosphate
actgcacggacgaggagggcatc

SEQ ID NO: 2987 - RNA, 23 nt, synthetic construct
  source 1..23: mol_type = other RNA
  modified_base 3: mod_base = OTHER; note = 5'-methyluridine-3'-phosphate
  modified_base 4: mod_base = OTHER; note = 5'-methyluridine-3'-phosphate
  modified_base 5: mod_base = OTHER; note = 5'-methyluridine-3'-phosphate
  modified_base 12: mod_base = OTHER; note = 5'-methyluridine-3'-phosphate
  modified_base 22: mod_base = OTHER; note = 5'-methyluridine-3'-phosphate
cctttgcggagtgccacgcactg

SEQ ID NO: 2988 - RNA, 23 nt, synthetic construct
  source 1..23: mol_type = other RNA
  modified_base 1: mod_base = OTHER; note = 5'-methyluridine-3'-phosphate
  modified_base 11: mod_base = OTHER; note = 5'-methyluridine-3'-phosphate
  modified_base 15: mod_base = OTHER; note = 5'-methyluridine-3'-phosphate
  modified_base 19: mod_base = OTHER; note = 5'-methyluridine-3'-phosphate
tggacagcactgcgtacctggcc

SEQ ID NO: 2989 - RNA, 23 nt, synthetic construct
  source 1..23: mol_type = other RNA
  modified_base 2: mod_base = OTHER; note = 5'-methyluridine-3'-phosphate
  modified_base 9: mod_base = OTHER; note = 5'-methyluridine-3'-phosphate
  modified_base 10: mod_base = OTHER; note = 5'-methyluridine-3'-phosphate
  modified_base 11: mod_base = OTHER; note = 5'-methyluridine-3'-phosphate
  modified_base 13: mod_base = OTHER; note = 5'-methyluridine-3'-phosphate
  modified_base 18: mod_base = OTHER; note = 5'-methyluridine-3'-phosphate
  modified_base 21: mod_base = OTHER; note = 5'-methyluridine-3'-phosphate
gtgccacctttgtggaatactca

SEQ ID NO: 2990 - RNA, 23 nt, synthetic construct
  source 1..23: mol_type = other RNA
  modified_base 4: mod_base = OTHER; note = 5'-methyluridine-3'-phosphate
  modified_base 10: mod_base = OTHER; note = 5'-methyluridine-3'-phosphate
  modified_base 15: mod_base = OTHER; note = 5'-methyluridine-3'-phosphate
  modified_base 20: mod_base = OTHER; note = 5'-methyluridine-3'-phosphate
  modified_base 22: mod_base = OTHER; note = 5'-methyluridine-3'-phosphate
aactggaggtgccctgagctctg

SEQ ID NO: 2991 - RNA, 23 nt, synthetic construct
  source 1..23: mol_type = other RNA
  modified_base 4: mod_base = OTHER; note = 5'-methyluridine-3'-phosphate
  modified_base 10: mod_base = OTHER; note = 5'-methyluridine-3'-phosphate
ccctcaacatgcagcaccaggag

SEQ ID NO: 2992 - RNA, 23 nt, synthetic construct
  source 1..23: mol_type = other RNA
  modified_base 1: mod_base = OTHER; note = 5'-methyluridine-3'-phosphate
  modified_base 7: mod_base = OTHER; note = 5'-methyluridine-3'-phosphate
  modified_base 19: mod_base = OTHER; note = 5'-methyluridine-3'-phosphate
  modified_base 22: mod_base = OTHER; note = 5'-methyluridine-3'-phosphate
tcaccctgcacggacacctgctc

SEQ ID NO: 2993 - RNA, 23 nt, synthetic construct
  source 1..23: mol_type = other RNA
  modified_base 10: mod_base = OTHER; note = 5'-methyluridine-3'-phosphate
  modified_base 12: mod_base = OTHER; note = 5'-methyluridine-3'-phosphate
  modified_base 14: mod_base = OTHER; note = 5'-methyluridine-3'-phosphate
  modified_base 22: mod_base = OTHER; note = 5'-methyluridine-3'-phosphate
gaggaccactgtgtggacggctg

SEQ ID NO: 2994 - RNA, 23 nt, synthetic construct
  source 1..23: mol_type = other RNA
  modified_base 2: mod_base = OTHER; note = 5'-methyluridine-3'-phosphate
  modified_base 5: mod_base = OTHER; note = 5'-methyluridine-3'-phosphate
  modified_base 9: mod_base = OTHER; note = 5'-methyluridine-3'-phosphate
  modified_base 14: mod_base = OTHER; note = 5'-methyluridine-3'-phosphate
  modified_base 22: mod_base = OTHER; note = 5'-methyluridine-3'-phosphate
gtgctggatgacatcacgcactc

SEQ ID NO: 2995 - RNA, 23 nt, synthetic construct
  source 1..23: mol_type = other RNA
  modified_base 4: mod_base = OTHER; note = 5'-methyluridine-3'-phosphate
  modified_base 7: mod_base = OTHER; note = 5'-methyluridine-3'-phosphate
  modified_base 8: mod_base = OTHER; note = 5'-methyluridine-3'-phosphate
  modified_base 19: mod_base = OTHER; note = 5'-methyluridine-3'-phosphate
acctccttcaacaccacctgcag

SEQ ID NO: 2996 - RNA, 23 nt, synthetic construct
  source 1..23: mol_type = other RNA
  modified_base 4: mod_base = OTHER; note = 5'-methyluridine-3'-phosphate
  modified_base 6: mod_base = OTHER; note = 5'-methyluridine-3'-phosphate
  modified_base 12: mod_base = OTHER; note = 5'-methyluridine-3'-phosphate
  modified_base 22: mod_base = OTHER; note = 5'-methyluridine-3'-phosphate
ggctatggcagtgccaggacctg

SEQ ID NO: 2997 - RNA, 23 nt, synthetic construct
  source 1..23: mol_type = other RNA
  modified_base 6: mod_base = OTHER; note = 5'-methyluridine-3'-phosphate
  modified_base 8: mod_base = OTHER; note = 5'-methyluridine-3'-phosphate
  modified_base 11: mod_base = OTHER; note = 5'-methyluridine-3'-phosphate
  modified_base 19: mod_base = OTHER; note = 5'-methyluridine-3'-phosphate
  modified_base 21: mod_base = OTHER; note = 5'-methyluridine-3'-phosphate
ccacctatgatgagaaactctac

SEQ ID NO: 2998 - RNA, 23 nt, synthetic construct
  source 1..23: mol_type = other RNA
  modified_base 6: mod_base = OTHER; note = 5'-methyluridine-3'-phosphate
  modified_base 10: mod_base = OTHER; note = 5'-methyluridine-3'-phosphate
  modified_base 11: mod_base = OTHER; note = 5'-methyluridine-3'-phosphate
  modified_base 13: mod_base = OTHER; note = 5'-methyluridine-3'-phosphate
  modified_base 15: mod_base = OTHER; note = 5'-methyluridine-3'-phosphate
gcagctacgttctgtccaagaaa

SEQ ID NO: 2999 - RNA, 23 nt, synthetic construct
  source 1..23: mol_type = other RNA
  modified_base 12: mod_base = OTHER; note = 5'-methyluridine-3'-phosphate
  modified_base 13: mod_base = OTHER; note = 5'-methyluridine-3'-phosphate
  modified_base 19: mod_base = OTHER; note = 5'-methyluridine-3'-phosphate
  modified_base 22: mod_base = OTHER; note = 5'-methyluridine-3'-phosphate
ccgacagcagcttcaccgtgctg

SEQ ID NO: 3000 - RNA, 23 nt, synthetic construct
  source 1..23: mol_type = other RNA
  modified_base 16: mod_base = OTHER; note = 5'-methyluridine-3'-phosphate
  modified_base 20: mod_base = OTHER; note = 5'-methyluridine-3'-phosphate
acggacaacgagaactgcctgaa

SEQ ID NO: 3001 - RNA, 23 nt, synthetic construct
  source 1..23: mol_type = other RNA
  modified_base 2: mod_base = OTHER; note = 5'-methyluridine-3'-phosphate
  modified_base 3: mod_base = OTHER; note = 5'-methyluridine-3'-phosphate
  modified_base 6: mod_base = OTHER; note = 5'-methyluridine-3'-phosphate
  modified_base 11: mod_base = OTHER; note = 5'-methyluridine-3'-phosphate
  modified_base 15: mod_base = OTHER; note = 5'-methyluridine-3'-phosphate
  modified_base 17: mod_base = OTHER; note = 5'-methyluridine-3'-phosphate
gttcctcaactccatctacacgc

SEQ ID NO: 3002 - RNA, 23 nt, synthetic construct
  source 1..23: mol_type = other RNA
  modified_base 10: mod_base = OTHER; note = 5'-methyluridine-3'-phosphate
  modified_base 16: mod_base = OTHER; note = 5'-methyluridine-3'-phosphate
  modified_base 18: mod_base = OTHER; note = 5'-methyluridine-3'-phosphate
  modified_base 19: mod_base = OTHER; note = 5'-methyluridine-3'-phosphate
cagccaacatcaccctgttcaca

SEQ ID NO: 3003 - RNA, 23 nt, synthetic construct
  source 1..23: mol_type = other RNA
  modified_base 3: mod_base = OTHER; note = 5'-methyluridine-3'-phosphate
  modified_base 9: mod_base = OTHER; note = 5'-methyluridine-3'-phosphate
  modified_base 10: mod_base = OTHER; note = 5'-methyluridine-3'-phosphate
  modified_base 12: mod_base = OTHER; note = 5'-methyluridine-3'-phosphate
  modified_base 13: mod_base = OTHER; note = 5'-methyluridine-3'-phosphate
  modified_base 16: mod_base = OTHER; note = 5'-methyluridine-3'-phosphate
  modified_base 19: mod_base = OTHER; note = 5'-methyluridine-3'-phosphate
  modified_base 22: mod_base = OTHER; note = 5'-methyluridine-3'-phosphate
cctcgagcttcttcatcgtggtg

SEQ ID NO: 3004 - RNA, 23 nt, synthetic construct
  source 1..23: mol_type = other RNA
  modified_base 2: mod_base = OTHER; note = 5'-methyluridine-3'-phosphate
  modified_base 8: mod_base = OTHER; note = 5'-methyluridine-3'-phosphate
  modified_base 11: mod_base = OTHER; note = 5'-methyluridine-3'-phosphate
  modified_base 17: mod_base = OTHER; note = 5'-methyluridine-3'-phosphate
  modified_base 19: mod_base = OTHER; note = 5'-methyluridine-3'-phosphate
  modified_base 20: mod_base = OTHER; note = 5'-methyluridine-3'-phosphate
  modified_base 21: mod_base = OTHER; note = 5'-methyluridine-3'-phosphate
  modified_base 23: mod_base = OTHER; note = 5'-methyluridine
gtgccactcatgcaggtgtttgt

SEQ ID NO: 3005 - RNA, 23 nt, synthetic construct
  source 1..23: mol_type = other RNA
  modified_base 2: mod_base = OTHER; note = 5'-methyluridine-3'-phosphate
  modified_base 9: mod_base = OTHER; note = 5'-methyluridine-3'-phosphate
  modified_base 10: mod_base = OTHER; note = 5'-methyluridine-3'-phosphate
gtgggaacttcaaccagaaccag

SEQ ID NO: 3006 - RNA, 23 nt, synthetic construct
  source 1..23: mol_type = other RNA
  modified_base 3: mod_base = OTHER; note = 5'-methyluridine-3'-phosphate
  modified_base 10: mod_base = OTHER; note = 5'-methyluridine-3'-phosphate
  modified_base 11: mod_base = OTHER; note = 5'-methyluridine-3'-phosphate
  modified_base 20: mod_base = OTHER; note = 5'-methyluridine-3'-phosphate
gctgacgacttcacggccctcag

SEQ ID NO: 3007 - RNA, 23 nt, synthetic construct
  source 1..23: mol_type = other RNA
  modified_base 7: mod_base = OTHER; note = 5'-methyluridine-3'-phosphate
  modified_base 8: mod_base = OTHER; note = 5'-methyluridine-3'-phosphate
  modified_base 19: mod_base = OTHER; note = 5'-methyluridine-3'-phosphate
gcagccttcgccaacacctggaa

SEQ ID NO: 3008 - RNA, 23 nt, synthetic construct
  source 1..23: mol_type = other RNA
  modified_base 1: mod_base = OTHER; note = 5'-methyluridine-3'-phosphate
  modified_base 14: mod_base = OTHER; note = 5'-methyluridine-3'-phosphate
  modified_base 15: mod_base = OTHER; note = 5'-methyluridine-3'-phosphate
  modified_base 16: mod_base = OTHER; note = 5'-methyluridine-3'-phosphate
tgccaggaacagctttgaggacc

SEQ ID NO: 3009 - RNA, 23 nt, synthetic construct
  source 1..23: mol_type = other RNA
  modified_base 2: mod_base = OTHER; note = 5'-methyluridine-3'-phosphate
  modified_base 4: mod_base = OTHER; note = 5'-methyluridine-3'-phosphate
  modified_base 11: mod_base = OTHER; note = 5'-methyluridine-3'-phosphate
  modified_base 18: mod_base = OTHER; note = 5'-methyluridine-3'-phosphate
gtgtggagaatgagaactacgcc

SEQ ID NO: 3010 - RNA, 23 nt, synthetic construct
  source 1..23: mol_type = other RNA
  modified_base 9: mod_base = OTHER; note = 5'-methyluridine-3'-phosphate
  modified_base 13: mod_base = OTHER; note = 5'-methyluridine-3'-phosphate
  modified_base 14: mod_base = OTHER; note = 5'-methyluridine-3'-phosphate
  modified_base 16: mod_base = OTHER; note = 5'-methyluridine-3'-phosphate
  modified_base 22: mod_base = OTHER; note = 5'-methyluridine-3'-phosphate
cccaacagtgccttctcgcgctg

SEQ ID NO: 3011 - RNA, 23 nt, synthetic construct
  source 1..23: mol_type = other RNA
  modified_base 4: mod_base = OTHER; note = 5'-methyluridine-3'-phosphate
  modified_base 5: mod_base = OTHER; note = 5'-methyluridine-3'-phosphate
  modified_base 10: mod_base = OTHER; note = 5'-methyluridine-3'-phosphate
  modified_base 16: mod_base = OTHER; note = 5'-methyluridine-3'-phosphate
  modified_base 20: mod_base = OTHER; note = 5'-methyluridine-3'-phosphate
  modified_base 22: mod_base = OTHER; note = 5'-methyluridine-3'-phosphate
  modified_base 23: mod_base = OTHER; note = 5'-methyluridine
cccttccactcgaactgcatgtt

SEQ ID NO: 3012 - RNA, 23 nt, synthetic construct
  source 1..23: mol_type = other RNA
  modified_base 7: mod_base = OTHER; note = 5'-methyluridine-3'-phosphate
  modified_base 13: mod_base = OTHER; note = 5'-methyluridine-3'-phosphate
  modified_base 15: mod_base = OTHER; note = 5'-methyluridine-3'-phosphate
gacacctgcaactgtgagcggag

SEQ ID NO: 3013 - RNA, 23 nt, synthetic construct
  source 1..23: mol_type = other RNA
  modified_base 2: mod_base = OTHER; note = 5'-methyluridine-3'-phosphate
  modified_base 5: mod_base = OTHER; note = 5'-methyluridine-3'-phosphate
  modified_base 8: mod_base = OTHER; note = 5'-methyluridine-3'-phosphate
  modified_base 10: mod_base = OTHER; note = 5'-methyluridine-3'-phosphate
  modified_base 12: mod_base = OTHER; note = 5'-methyluridine-3'-phosphate
  modified_base 20: mod_base = OTHER; note = 5'-methyluridine-3'-phosphate
  modified_base 22: mod_base = OTHER; note = 5'-methyluridine-3'-phosphate
gtcctcctatgtgcacgcctgtg

SEQ ID NO: 3014 - RNA, 23 nt, synthetic construct
  source 1..23: mol_type = other RNA
  modified_base 7: mod_base = OTHER; note = 5'-methyluridine-3'-phosphate
  modified_base 13: mod_base = OTHER; note = 5'-methyluridine-3'-phosphate
  modified_base 21: mod_base = OTHER; note = 5'-methyluridine-3'-phosphate
agggcgtacagctcagcgactgg

SEQ ID NO: 3015 - RNA, 23 nt, synthetic construct
  source 1..23: mol_type = other RNA
  modified_base 9: mod_base = OTHER; note = 5'-methyluridine-3'-phosphate
  modified_base 13: mod_base = OTHER; note = 5'-methyluridine-3'-phosphate
  modified_base 21: mod_base = OTHER; note = 5'-methyluridine-3'-phosphate
gcaccaagtacatgcagaactgc

SEQ ID NO: 3016 - RNA, 23 nt, synthetic construct
  source 1..23: mol_type = other RNA
  modified_base 3: mod_base = OTHER; note = 5'-methyluridine-3'-phosphate
  modified_base 9: mod_base = OTHER; note = 5'-methyluridine-3'-phosphate
  modified_base 13: mod_base = OTHER; note = 5'-methyluridine-3'-phosphate
  modified_base 16: mod_base = OTHER; note = 5'-methyluridine-3'-phosphate
  modified_base 20: mod_base = OTHER; note = 5'-methyluridine-3'-phosphate
gctacgcctacgtggtggatgcc

SEQ ID NO: 3017 - RNA, 23 nt, synthetic construct
  source 1..23: mol_type = other RNA
  modified_base 2: mod_base = OTHER; note = 5'-methyluridine-3'-phosphate
  modified_base 9: mod_base = OTHER; note = 5'-methyluridine-3'-phosphate
  modified_base 10: mod_base = OTHER; note = 5'-methyluridine-3'-phosphate
  modified_base 11: mod_base = OTHER; note = 5'-methyluridine-3'-phosphate
  modified_base 14: mod_base = OTHER; note = 5'-methyluridine-3'-phosphate
  modified_base 15: mod_base = OTHER; note = 5'-methyluridine-3'-phosphate
  modified_base 18: mod_base = OTHER; note = 5'-methyluridine-3'-phosphate
  modified_base 22: mod_base = OTHER; note = 5'-methyluridine-3'-phosphate
ctgcagcgtttccttcgtgcctg

SEQ ID NO: 3018 - RNA, 23 nt, synthetic construct
  source 1..23: mol_type = other RNA
  modified_base 8: mod_base = OTHER; note = 5'-methyluridine-3'-phosphate
  modified_base 9: mod_base = OTHER; note = 5'-methyluridine-3'-phosphate
  modified_base 12: mod_base = OTHER; note = 5'-methyluridine-3'-phosphate
  modified_base 16: mod_base = OTHER; note = 5'-methyluridine-3'-phosphate
gggcaccttcctcaatgacgcgg

SEQ ID NO: 3019 - RNA, 23 nt, synthetic construct
  source 1..23: mol_type = other RNA
  modified_base 1: mod_base = OTHER; note = 5'-methyluridine-3'-phosphate
  modified_base 4: mod_base = OTHER; note = 5'-methyluridine-3'-phosphate
  modified_base 12: mod_base = OTHER; note = 5'-methyluridine-3'-phosphate
  modified_base 15: mod_base = OTHER; note = 5'-methyluridine-3'-phosphate
tcctggagaggtggtgcacgacg

SEQ ID NO: 3020 - RNA, 23 nt, synthetic construct
  source 1..23: mol_type = other RNA
  modified_base 6: mod_base = OTHER; note = 5'-methyluridine-3'-phosphate
  modified_base 8: mod_base = OTHER; note = 5'-methyluridine-3'-phosphate
  modified_base 10: mod_base = OTHER; note = 5'-methyluridine-3'-phosphate
  modified_base 11: mod_base = OTHER; note = 5'-methyluridine-3'-phosphate
  modified_base 14: mod_base = OTHER; note = 5'-methyluridine-3'-phosphate
  modified_base 16: mod_base = OTHER; note = 5'-methyluridine-3'-phosphate
  modified_base 22: mod_base = OTHER; note = 5'-methyluridine-3'-phosphate
cgccgtgtgttcatgtacgggtg

SEQ ID NO: 3021 - RNA, 23 nt, synthetic construct
  source 1..23: mol_type = other RNA
  modified_base 5: mod_base = OTHER; note = 5'-methyluridine-3'-phosphate
  modified_base 7: mod_base = OTHER; note = 5'-methyluridine-3'-phosphate
  modified_base 9: mod_base = OTHER; note = 5'-methyluridine-3'-phosphate
agcctctctgcagaaaagcacag

SEQ ID NO: 3022 - RNA, 23 nt, synthetic construct
  source 1..23: mol_type = other RNA
  modified_base 2: mod_base = OTHER; note = 5'-methyluridine-3'-phosphate
  modified_base 7: mod_base = OTHER; note = 5'-methyluridine-3'-phosphate
  modified_base 19: mod_base = OTHER; note = 5'-methyluridine-3'-phosphate
ctggactgcagcaacagctcggc

SEQ ID NO: 3023 - RNA, 23 nt, synthetic construct
  source 1..23: mol_type = other RNA
  modified_base 4: mod_base = OTHER; note = 5'-methyluridine-3'-phosphate
  modified_base 6: mod_base = OTHER; note = 5'-methyluridine-3'-phosphate
  modified_base 7: mod_base = OTHER; note = 5'-methyluridine-3'-phosphate
  modified_base 8: mod_base = OTHER; note = 5'-methyluridine-3'-phosphate
  modified_base 19: mod_base = OTHER; note = 5'-methyluridine-3'-phosphate
  modified_base 23: mod_base = OTHER; note = 5'-methyluridine
ggctgtttcagcacacactgcgt

SEQ ID NO: 3024 - RNA, 23 nt, synthetic construct
  source 1..23: mol_type = other RNA
  modified_base 4: mod_base = OTHER; note = 5'-methyluridine-3'-phosphate
  modified_base 8: mod_base = OTHER; note = 5'-methyluridine-3'-phosphate
  modified_base 9: mod_base = OTHER; note = 5'-methyluridine-3'-phosphate
  modified_base 22: mod_base = OTHER; note = 5'-methyluridine-3'-phosphate
ggctgcattgccgaggaggactg

SEQ ID NO: 3025 - RNA, 23 nt, synthetic construct
  source 1..23: mol_type = other RNA
  modified_base 7: mod_base = OTHER; note = 5'-methyluridine-3'-phosphate
  modified_base 15: mod_base = OTHER; note = 5'-methyluridine-3'-phosphate
gccacctacaagcctggagagac

SEQ ID NO: 3026 - RNA, 23 nt, synthetic construct
  source 1..23: mol_type = other RNA
  modified_base 2: mod_base = OTHER; note = 5'-methyluridine-3'-phosphate
  modified_base 7: mod_base = OTHER; note = 5'-methyluridine-3'-phosphate
  modified_base 16: mod_base = OTHER; note = 5'-methyluridine-3'-phosphate
  modified_base 22: mod_base = OTHER; note = 5'-methyluridine-3'-phosphate
gtcgactgcaacacctgcacctg

SEQ ID NO: 3027 - RNA, 23 nt, synthetic construct
  source 1..23: mol_type = other RNA
  modified_base 13: mod_base = OTHER; note = 5'-methyluridine-3'-phosphate
  modified_base 19: mod_base = OTHER; note = 5'-methyluridine-3'-phosphate
aggaaccggaggtgggagtgcag

SEQ ID NO: 3028 - RNA, 23 nt, synthetic construct
  source 1..23: mol_type = other RNA
  modified_base 3: mod_base = OTHER; note = 5'-methyluridine-3'-phosphate
  modified_base 10: mod_base = OTHER; note = 5'-methyluridine-3'-phosphate
  modified_base 11: mod_base = OTHER; note = 5'-methyluridine-3'-phosphate
  modified_base 14: mod_base = OTHER; note = 5'-methyluridine-3'-phosphate
  modified_base 19: mod_base = OTHER; note = 5'-methyluridine-3'-phosphate
  modified_base 20: mod_base = OTHER; note = 5'-methyluridine-3'-phosphate
  modified_base 21: mod_base = OTHER; note = 5'-methyluridine-3'-phosphate
gatggccacttcatcacctttga

SEQ ID NO: 3029 - RNA, 23 nt, synthetic construct
  source 1..23: mol_type = other RNA
  modified_base 6: mod_base = OTHER; note = 5'-methyluridine-3'-phosphate
  modified_base 10: mod_base = OTHER; note = 5'-methyluridine-3'-phosphate
  modified_base 16: mod_base = OTHER; note = 5'-methyluridine-3'-phosphate
  modified_base 17: mod_base = OTHER; note = 5'-methyluridine-3'-phosphate
  modified_base 18: mod_base = OTHER; note = 5'-methyluridine-3'-phosphate
ggcgatcgctacagctttgaagg

SEQ ID NO: 3030 - RNA, 23 nt, synthetic construct
  source 1..23: mol_type = other RNA
  modified_base 5: mod_base = OTHER; note = 5'-methyluridine-3'-phosphate
  modified_base 11: mod_base = OTHER; note = 5'-methyluridine-3'-phosphate
  modified_base 15: mod_base = OTHER; note = 5'-methyluridine-3'-phosphate
  modified_base 17: mod_base = OTHER; note = 5'-methyluridine-3'-phosphate
  modified_base 18: mod_base = OTHER; note = 5'-methyluridine-3'-phosphate
cagctgcgagtacatcttggccc

SEQ ID NO: 3031 - RNA, 23 nt, synthetic construct
  source 1..23: mol_type = other RNA
  modified_base 4: mod_base = OTHER; note = 5'-methyluridine-3'-phosphate
  modified_base 5: mod_base = OTHER; note = 5'-methyluridine-3'-phosphate
  modified_base 11: mod_base = OTHER; note = 5'-methyluridine-3'-phosphate
  modified_base 14: mod_base = OTHER; note = 5'-methyluridine-3'-phosphate
accttccgcatcgtcaccgagaa

SEQ ID NO: 3032 - RNA, 23 nt, synthetic construct
  source 1..23: mol_type = other RNA
  modified_base 7: mod_base = OTHER; note = 5'-methyluridine-3'-phosphate
  modified_base 13: mod_base = OTHER; note = 5'-methyluridine-3'-phosphate
  modified_base 15: mod_base = OTHER; note = 5'-methyluridine-3'-phosphate
  modified_base 16: mod_base = OTHER; note = 5'-methyluridine-3'-phosphate
  modified_base 19: mod_base = OTHER; note = 5'-methyluridine-3'-phosphate
aggccatcaagctcttcgtggag

SEQ ID NO: 3033 - RNA, 23 nt, synthetic construct
  source 1..23: mol_type = other RNA
  modified_base 3: mod_base = OTHER; note = 5'-methyluridine-3'-phosphate
  modified_base 10: mod_base = OTHER; note = 5'-methyluridine-3'-phosphate
  modified_base 13: mod_base = OTHER; note = 5'-methyluridine-3'-phosphate
  modified_base 16: mod_base = OTHER; note = 5'-methyluridine-3'-phosphate
gctacgagctgatcctccaagag

SEQ ID NO: 3034 - RNA, 23 nt, synthetic construct
  source 1..23: mol_type = other RNA
  modified_base 7: mod_base = OTHER; note = 5'-methyluridine-3'-phosphate
  modified_base 8: mod_base = OTHER; note = 5'-methyluridine-3'-phosphate
  modified_base 9: mod_base = OTHER; note = 5'-methyluridine-3'-phosphate
  modified_base 17: mod_base = OTHER; note = 5'-methyluridine-3'-phosphate
gggacctttaaggcggtggcgag

SEQ ID NO: 3035 - RNA, 23 nt, synthetic construct
  source 1..23: mol_type = other RNA
  modified_base 7: mod_base = OTHER; note = 5'-methyluridine-3'-phosphate
  modified_base 14: mod_base = OTHER; note = 5'-methyluridine-3'-phosphate
  modified_base 19: mod_base = OTHER; note = 5'-methyluridine-3'-phosphate
  modified_base 23: mod_base = OTHER; note = 5'-methyluridine
ccaccctacaagatacgctacat

SEQ ID NO: 3036 - RNA, 23 nt, synthetic construct
  source 1..23: mol_type = other RNA
  modified_base 1: mod_base = OTHER; note = 5'-methyluridine-3'-phosphate
  modified_base 3: mod_base = OTHER; note = 5'-methyluridine-3'-phosphate
  modified_base 4: mod_base = OTHER; note = 5'-methyluridine-3'-phosphate
  modified_base 7: mod_base = OTHER; note = 5'-methyluridine-3'-phosphate
  modified_base 10: mod_base = OTHER; note = 5'-methyluridine-3'-phosphate
  modified_base 13: mod_base = OTHER; note = 5'-methyluridine-3'-phosphate
tcttcctggtcatcgagacccac

SEQ ID NO: 3037 - RNA, 23 nt, synthetic construct
  source 1..23: mol_type = other RNA
  modified_base 9: mod_base = OTHER; note = 5'-methyluridine-3'-phosphate
  modified_base 11: mod_base = OTHER; note = 5'-methyluridine-3'-phosphate
  modified_base 12: mod_base = OTHER; note = 5'-methyluridine-3'-phosphate
  modified_base 15: mod_base = OTHER; note = 5'-methyluridine-3'-phosphate
  modified_base 21: mod_base = OTHER; note = 5'-methyluridine-3'-phosphate
gaccagcgtgttcatccgactgc

SEQ ID NO: 3038 - RNA, 23 nt, synthetic construct
  source 1..23: mol_type = other RNA
  modified_base 9: mod_base = OTHER; note = 5'-methyluridine-3'-phosphate
  modified_base 22: mod_base = OTHER; note = 5'-methyluridine-3'-phosphate
accaggactacaagggcagggtc

SEQ ID NO: 3039 - RNA, 23 nt, synthetic construct
  source 1..23: mol_type = other RNA
  modified_base 9: mod_base = OTHER; note = 5'-methyluridine-3'-phosphate
  modified_base 10: mod_base = OTHER; note = 5'-methyluridine-3'-phosphate
  modified_base 20: mod_base = OTHER; note = 5'-methyluridine-3'-phosphate
gcgggaacttcgacgacaatgcc

SEQ ID NO: 3040 - RNA, 23 nt, synthetic construct
  source 1..23: mol_type = other RNA
  modified_base 2: mod_base = OTHER; note = 5'-methyluridine-3'-phosphate
  modified_base 6: mod_base = OTHER; note = 5'-methyluridine-3'-phosphate
  modified_base 10: mod_base = OTHER; note = 5'-methyluridine-3'-phosphate
  modified_base 11: mod_base = OTHER; note = 5'-methyluridine-3'-phosphate
  modified_base 12: mod_base = OTHER; note = 5'-methyluridine-3'-phosphate
  modified_base 21: mod_base = OTHER; note = 5'-methyluridine-3'-phosphate
atcaatgactttgccacgcgtag

SEQ ID NO: 3041 - RNA, 23 nt, synthetic construct
  source 1..23: mol_type = other RNA
  modified_base 7: mod_base = OTHER; note = 5'-methyluridine-3'-phosphate
  modified_base 12: mod_base = OTHER; note = 5'-methyluridine-3'-phosphate
  modified_base 13: mod_base = OTHER; note = 5'-methyluridine-3'-phosphate
  modified_base 14: mod_base = OTHER; note = 5'-methyluridine-3'-phosphate
acgcactggagtttgggaacagc

SEQ ID NO: 3042 - RNA, 23 nt, synthetic construct
  source 1..23: mol_type = other RNA
  modified_base 1: mod_base = OTHER; note = 5'-methyluridine-3'-phosphate
  modified_base 16: mod_base = OTHER; note = 5'-methyluridine-3'-phosphate
  modified_base 23: mod_base = OTHER; note = 5'-methyluridine
tgggcccagaagcagtgcagcat

SEQ ID NO: 3043 - RNA, 23 nt, synthetic construct
  source 1..23: mol_type = other RNA
  modified_base 1: mod_base = OTHER; note = 5'-methyluridine-3'-phosphate
  modified_base 8: mod_base = OTHER; note = 5'-methyluridine-3'-phosphate
  modified_base 9: mod_base = OTHER; note = 5'-methyluridine-3'-phosphate
  modified_base 13: mod_base = OTHER; note = 5'-methyluridine-3'-phosphate
  modified_base 22: mod_base = OTHER; note = 5'-methyluridine-3'-phosphate
tcccaggttgactccaccaagta

SEQ ID NO: 3044 - RNA, 23 nt, synthetic construct
  source 1..23: mol_type = other RNA
  modified_base 1: mod_base = OTHER; note = 5'-methyluridine-3'-phosphate
  modified_base 10: mod_base = OTHER; note = 5'-methyluridine-3'-phosphate
  modified_base 14: mod_base = OTHER; note = 5'-methyluridine-3'-phosphate
tacgaggcctgcgtgaacgacgc

SEQ ID NO: 3045 - RNA, 23 nt, synthetic construct
  source 1..23: mol_type = other RNA
  modified_base 5: mod_base = OTHER; note = 5'-methyluridine-3'-phosphate
  modified_base 11: mod_base = OTHER; note = 5'-methyluridine-3'-phosphate
  modified_base 13: mod_base = OTHER; note = 5'-methyluridine-3'-phosphate
  modified_base 14: mod_base = OTHER; note = 5'-methyluridine-3'-phosphate
  modified_base 15: mod_base = OTHER; note = 5'-methyluridine-3'-phosphate
  modified_base 17: mod_base = OTHER; note = 5'-methyluridine-3'-phosphate
cgactgcgagtgtttctgcacgg

SEQ ID NO: 3046 - RNA, 23 nt, synthetic construct
  source 1..23: mol_type = other RNA
  modified_base 3: mod_base = OTHER; note = 5'-methyluridine-3'-phosphate
  modified_base 5: mod_base = OTHER; note = 5'-methyluridine-3'-phosphate
  modified_base 7: mod_base = OTHER; note = 5'-methyluridine-3'-phosphate
  modified_base 9: mod_base = OTHER; note = 5'-methyluridine-3'-phosphate
  modified_base 11: mod_base = OTHER; note = 5'-methyluridine-3'-phosphate
  modified_base 14: mod_base = OTHER; note = 5'-methyluridine-3'-phosphate
  modified_base 22: mod_base = OTHER; note = 5'-methyluridine-3'-phosphate
cctgtgtgtgtcctggcggactc

SEQ ID NO: 3047 - RNA, 23 nt, synthetic construct
  source 1..23: mol_type = other RNA
  modified_base 2: mod_base = OTHER; note = 5'-methyluridine-3'-phosphate
  modified_base 3: mod_base = OTHER; note = 5'-methyluridine-3'-phosphate
  modified_base 5: mod_base = OTHER; note = 5'-methyluridine-3'-phosphate
  modified_base 6: mod_base = OTHER; note = 5'-methyluridine-3'-phosphate
  modified_base 8: mod_base = OTHER; note = 5'-methyluridine-3'-phosphate
  modified_base 10: mod_base = OTHER; note = 5'-methyluridine-3'-phosphate
  modified_base 14: mod_base = OTHER; note = 5'-methyluridine-3'-phosphate
  modified_base 15: mod_base = OTHER; note = 5'-methyluridine-3'-phosphate
  modified_base 17: mod_base = OTHER; note = 5'-methyluridine-3'-phosphate
cttgttctgtgacttctacaacc

SEQ ID NO: 3048 - RNA, 23 nt, synthetic construct
  source 1..23: mol_type = other RNA
  modified_base 3: mod_base = OTHER; note = 5'-methyluridine-3'-phosphate
  modified_base 5: mod_base = OTHER; note = 5'-methyluridine-3'-phosphate
  modified_base 9: mod_base = OTHER; note = 5'-methyluridine-3'-phosphate
  modified_base 15: mod_base = OTHER; note = 5'-methyluridine-3'-phosphate
gctgtgagtggcactaccagccc

SEQ ID NO: 3049 - RNA, 23 nt, synthetic construct
  source 1..23: mol_type = other RNA
  modified_base 5: mod_base = OTHER; note = 5'-methyluridine-3'-phosphate
  modified_base 8: mod_base = OTHER; note = 5'-methyluridine-3'-phosphate
  modified_base 17: mod_base = OTHER; note = 5'-methyluridine-3'-phosphate
aggctgctacccgaagtgcccac

SEQ ID NO: 3050 - RNA, 23 nt, synthetic construct
  source 1..23: mol_type = other RNA
  modified_base 8: mod_base = OTHER; note = 5'-methyluridine-3'-phosphate
  modified_base 9: mod_base = OTHER; note = 5'-methyluridine-3'-phosphate
  modified_base 11: mod_base = OTHER; note = 5'-methyluridine-3'-phosphate
  modified_base 12: mod_base = OTHER; note = 5'-methyluridine-3'-phosphate
  modified_base 16: mod_base = OTHER; note = 5'-methyluridine-3'-phosphate
ccagcccttcttcaatgaggacc

SEQ ID NO: 3051 - RNA, 23 nt, synthetic construct
  source 1..23: mol_type = other RNA
  modified_base 1: mod_base = OTHER; note = 5'-methyluridine-3'-phosphate
  modified_base 6: mod_base = OTHER; note = 5'-methyluridine-3'-phosphate
  modified_base 10: mod_base = OTHER; note = 5'-methyluridine-3'-phosphate
  modified_base 18: mod_base = OTHER; note = 5'-methyluridine-3'-phosphate
  modified_base 20: mod_base = OTHER; note = 5'-methyluridine-3'-phosphate
tgaagtgcgtggcccagtgtggc

SEQ ID NO: 3052 - RNA, 23 nt, synthetic construct
  source 1..23: mol_type = other RNA
  modified_base 1: mod_base = OTHER; note = 5'-methyluridine-3'-phosphate
  modified_base 4: mod_base = OTHER; note = 5'-methyluridine-3'-phosphate
  modified_base 22: mod_base = OTHER; note = 5'-methyluridine-3'-phosphate
tgctacgacaaggacggaaacta

SEQ ID NO: 3053 - RNA, 23 nt, synthetic construct
  source 1..23: mol_type = other RNA
  modified_base 1: mod_base = OTHER; note = 5'-methyluridine-3'-phosphate
  modified_base 3: mod_base = OTHER; note = 5'-methyluridine-3'-phosphate
  modified_base 8: mod_base = OTHER; note = 5'-methyluridine-3'-phosphate
  modified_base 12: mod_base = OTHER; note = 5'-methyluridine-3'-phosphate
  modified_base 20: mod_base = OTHER; note = 5'-methyluridine-3'-phosphate
tatgacgtcggtgcaagggtccc

SEQ ID NO: 3054 - RNA, 23 nt, synthetic construct
  source 1..23: mol_type = other RNA
  modified_base 1: mod_base = OTHER; note = 5'-methyluridine-3'-phosphate
  modified_base 10: mod_base = OTHER; note = 5'-methyluridine-3'-phosphate
  modified_base 12: mod_base = OTHER; note = 5'-methyluridine-3'-phosphate
  modified_base 16: mod_base = OTHER; note = 5'-methyluridine-3'-phosphate
tgccagagctgtaactgcacacc

SEQ ID NO: 3055 - RNA, 23 nt, synthetic construct
  source 1..23: mol_type = other RNA
  modified_base 1: mod_base = OTHER; note = 5'-methyluridine-3'-phosphate
  modified_base 6: mod_base = OTHER; note = 5'-methyluridine-3'-phosphate
  modified_base 11: mod_base = OTHER; note = 5'-methyluridine-3'-phosphate
  modified_base 19: mod_base = OTHER; note = 5'-methyluridine-3'-phosphate
  modified_base 20: mod_base = OTHER; note = 5'-methyluridine-3'-phosphate
tccagtgcgctcacagccttgag

SEQ ID NO: 3056 - RNA, 23 nt, synthetic construct
  source 1..23: mol_type = other RNA
  modified_base 4: mod_base = OTHER; note = 5'-methyluridine-3'-phosphate
  modified_base 10: mod_base = OTHER; note = 5'-methyluridine-3'-phosphate
  modified_base 12: mod_base = OTHER; note = 5'-methyluridine-3'-phosphate
acctgcacctatgaggacaggac

SEQ ID NO: 3057 - RNA, 23 nt, synthetic construct
  source 1..23: mol_type = other RNA
  modified_base 10: mod_base = OTHER; note = 5'-methyluridine-3'-phosphate
  modified_base 13: mod_base = OTHER; note = 5'-methyluridine-3'-phosphate
  modified_base 15: mod_base = OTHER; note = 5'-methyluridine-3'-phosphate
accaggacgtcatctacaacacc

SEQ ID NO: 3058 - RNA, 23 nt, synthetic construct
  source 1..23: mol_type = other RNA
  modified_base 7: mod_base = OTHER; note = 5'-methyluridine-3'-phosphate
  modified_base 10: mod_base = OTHER; note = 5'-methyluridine-3'-phosphate
  modified_base 11: mod_base = OTHER; note = 5'-methyluridine-3'-phosphate
  modified_base 14: mod_base = OTHER; note = 5'-methyluridine-3'-phosphate
  modified_base 20: mod_base = OTHER; note = 5'-methyluridine-3'-phosphate
  modified_base 22: mod_base = OTHER; note = 5'-methyluridine-3'-phosphate
ggcgcctgcttgatcgccatctg

SEQ ID NO: 3059 - RNA, 23 nt, synthetic construct
  source 1..23: mol_type = other RNA
  modified_base 7: mod_base = OTHER; note = 5'-methyluridine-3'-phosphate
  modified_base 10: mod_base = OTHER; note = 5'-methyluridine-3'-phosphate
  modified_base 20: mod_base = OTHER; note = 5'-methyluridine-3'-phosphate
  modified_base 22: mod_base = OTHER; note = 5'-methyluridine-3'-phosphate
gcaccatcatcaggaaggctgtg

SEQ ID NO: 3060 - RNA, 23 nt, synthetic construct
  source 1..23: mol_type = other RNA
  modified_base 13: mod_base = OTHER; note = 5'-methyluridine-3'-phosphate
  modified_base 14: mod_base = OTHER; note = 5'-methyluridine-3'-phosphate
  modified_base 19: mod_base = OTHER; note = 5'-methyluridine-3'-phosphate
  modified_base 20: mod_base = OTHER; note = 5'-methyluridine-3'-phosphate
gccacaacgccattcaccttcac

SEQ ID NO: 3061 - RNA, 23 nt, synthetic construct
  source 1..23: mol_type = other RNA
  modified_base 1: mod_base = OTHER; note = 5'-methyluridine-3'-phosphate
  modified_base 3: mod_base = OTHER; note = 5'-methyluridine-3'-phosphate
  modified_base 10: mod_base = OTHER; note = 5'-methyluridine-3'-phosphate
  modified_base 12: mod_base = OTHER; note = 5'-methyluridine-3'-phosphate
  modified_base 14: mod_base = OTHER; note = 5'-methyluridine-3'-phosphate
  modified_base 16: mod_base = OTHER; note = 5'-methyluridine-3'-phosphate
tctccaccgtgtgtgtccgcgag

SEQ ID NO: 3062 - RNA, 23 nt, synthetic construct
  source 1..23: mol_type = other RNA
  modified_base 3: mod_base = OTHER; note = 5'-methyluridine-3'-phosphate
  modified_base 9: mod_base = OTHER; note = 5'-methyluridine-3'-phosphate
  modified_base 12: mod_base = OTHER; note = 5'-methyluridine-3'-phosphate
  modified_base 17: mod_base = OTHER; note = 5'-methyluridine-3'-phosphate
ggtccagctggtacaatgggcac

SEQ ID NO: 3063 - RNA, 23 nt, synthetic construct
  source 1..23: mol_type = other RNA
  modified_base 10: mod_base = OTHER; note = 5'-methyluridine-3'-phosphate
  modified_base 11: mod_base = OTHER; note = 5'-methyluridine-3'-phosphate
  modified_base 12: mod_base = OTHER; note = 5'-methyluridine-3'-phosphate
  modified_base 19: mod_base = OTHER; note = 5'-methyluridine-3'-phosphate
  modified_base 20: mod_base = OTHER; note = 5'-methyluridine-3'-phosphate
  modified_base 21: mod_base = OTHER; note = 5'-methyluridine-3'-phosphate
ggcggagactttgagacgtttga

SEQ ID NO: 3064 - RNA, 23 nt, synthetic construct
  source 1..23: mol_type = other RNA
  modified_base 8: mod_base = OTHER; note = 5'-methyluridine-3'-phosphate
  modified_base 15: mod_base = OTHER; note = 5'-methyluridine-3'-phosphate
  modified_base 17: mod_base = OTHER; note = 5'-methyluridine-3'-phosphate
  modified_base 22: mod_base = OTHER; note = 5'-methyluridine-3'-phosphate
gagagggtaccaggtatgccctg

SEQ ID NO: 3065 - RNA, 23 nt, synthetic construct
  source 1..23: mol_type = other RNA
  modified_base 1: mod_base = OTHER; note = 5'-methyluridine-3'-phosphate
  modified_base 4: mod_base = OTHER; note = 5'-methyluridine-3'-phosphate
  modified_base 8: mod_base = OTHER; note = 5'-methyluridine-3'-phosphate
  modified_base 13: mod_base = OTHER; note = 5'-methyluridine-3'-phosphate
  modified_base 18: mod_base = OTHER; note = 5'-methyluridine-3'-phosphate
tgctggctgacatcgagtgccgg

SEQ ID NO: 3066 - RNA, 23 nt, synthetic construct
  source 1..23: mol_type = other RNA
  modified_base 4: mod_base = OTHER; note = 5'-methyluridine-3'-phosphate
  modified_base 5: mod_base = OTHER; note = 5'-methyluridine-3'-phosphate
  modified_base 13: mod_base = OTHER; note = 5'-methyluridine-3'-phosphate
  modified_base 19: mod_base = OTHER; note = 5'-methyluridine-3'-phosphate
agcttcccgacatgccgctggag

SEQ ID NO: 3067 - RNA, 23 nt, synthetic construct
  source 1..23: mol_type = other RNA
  modified_base 7: mod_base = OTHER; note = 5'-methyluridine-3'-phosphate
  modified_base 12: mod_base = OTHER; note = 5'-methyluridine-3'-phosphate
  modified_base 14: mod_base = OTHER; note = 5'-methyluridine-3'-phosphate
  modified_base 22: mod_base = OTHER; note = 5'-methyluridine-3'-phosphate
agcaggtggactgtgaccgcatg

SEQ ID NO: 3068 - RNA, 23 nt, synthetic construct
  source 1..23: mol_type = other RNA
  modified_base 1: mod_base = OTHER; note = 5'-methyluridine-3'-phosphate
  modified_base 21: mod_base = OTHER; note = 5'-methyluridine-3'-phosphate
tgcgccaacagccaacagagtcc

SEQ ID NO: 3069 - RNA, 23 nt, synthetic construct
  source 1..23: mol_type = other RNA
  modified_base 3: mod_base = OTHER; note = 5'-methyluridine-3'-phosphate
  modified_base 5: mod_base = OTHER; note = 5'-methyluridine-3'-phosphate
  modified_base 7: mod_base = OTHER; note = 5'-methyluridine-3'-phosphate
  modified_base 14: mod_base = OTHER; note = 5'-methyluridine-3'-phosphate
  modified_base 21: mod_base = OTHER; note = 5'-methyluridine-3'-phosphate
gctctgtcacgactacgagctgc

SEQ ID NO: 3070 - RNA, 23 nt, synthetic construct
  source 1..23: mol_type = other RNA
  modified_base 2: mod_base = OTHER; note = 5'-methyluridine-3'-phosphate
  modified_base 3: mod_base = OTHER; note = 5'-methyluridine-3'-phosphate
  modified_base 5: mod_base = OTHER; note = 5'-methyluridine-3'-phosphate
  modified_base 7: mod_base = OTHER; note = 5'-methyluridine-3'-phosphate
  modified_base 10: mod_base = OTHER; note = 5'-methyluridine-3'-phosphate
  modified_base 16: mod_base = OTHER; note = 5'-methyluridine-3'-phosphate
  modified_base 20: mod_base = OTHER; note = 5'-methyluridine-3'-phosphate
gttctctgctgcgaatacgtgcc

SEQ ID NO: 3071 - RNA, 23 nt, synthetic construct
  source 1..23: mol_type = other RNA
  modified_base 12: mod_base = OTHER; note = 5'-methyluridine-3'-phosphate
  modified_base 15: mod_base = OTHER; note = 5'-methyluridine-3'-phosphate
  modified_base 17: mod_base = OTHER; note = 5'-methyluridine-3'-phosphate
  modified_base 21: mod_base = OTHER; note = 5'-methyluridine-3'-phosphate
agcacggagcctgctgtgcctac

SEQ ID NO: 3072 - RNA, 23 nt, synthetic construct
  source 1..23: mol_type = other RNA
  modified_base 2: mod_base = OTHER; note = 5'-methyluridine-3'-phosphate
  modified_base 7: mod_base = OTHER; note = 5'-methyluridine-3'-phosphate
  modified_base 15: mod_base = OTHER; note = 5'-methyluridine-3'-phosphate
  modified_base 19: mod_base = OTHER; note = 5'-methyluridine-3'-phosphate
ctcacctcgcagactgggtccag

SEQ ID NO: 3073 - RNA, 23 nt, synthetic construct
  source 1..23: mol_type = other RNA
  modified_base 9: mod_base = OTHER; note = 5'-methyluridine-3'-phosphate
  modified_base 12: mod_base = OTHER; note = 5'-methyluridine-3'-phosphate
  modified_base 13: mod_base = OTHER; note = 5'-methyluridine-3'-phosphate
  modified_base 14: mod_base = OTHER; note = 5'-methyluridine-3'-phosphate
  modified_base 17: mod_base = OTHER; note = 5'-methyluridine-3'-phosphate
ggacagagtggtttgatgaggac

SEQ ID NO: 3074 - RNA, 23 nt, synthetic construct
  source 1..23: mol_type = other RNA
  modified_base 7: mod_base = OTHER; note = 5'-methyluridine-3'-phosphate
  modified_base 8: mod_base = OTHER; note = 5'-methyluridine-3'-phosphate
  modified_base 12: mod_base = OTHER; note = 5'-methyluridine-3'-phosphate
  modified_base 15: mod_base = OTHER; note = 5'-methyluridine-3'-phosphate
  modified_base 20: mod_base = OTHER; note = 5'-methyluridine-3'-phosphate
gggacgttgagtcctacgataag

SEQ ID NO: 3075 - RNA, 23 nt, synthetic construct
  source 1..23: mol_type = other RNA
  modified_base 9: mod_base = OTHER; note = 5'-methyluridine-3'-phosphate
  modified_base 19: mod_base = OTHER; note = 5'-methyluridine-3'-phosphate
  modified_base 20: mod_base = OTHER; note = 5'-methyluridine-3'-phosphate
  modified_base 22: mod_base = OTHER; note = 5'-methyluridine-3'-phosphate
agggccgctggagggcacttatg

SEQ ID NO: 3076 - RNA, 23 nt, synthetic construct
  source 1..23: mol_type = other RNA
  modified_base 8: mod_base = OTHER; note = 5'-methyluridine-3'-phosphate
  modified_base 16: mod_base = OTHER; note = 5'-methyluridine-3'-phosphate
  modified_base 21: mod_base = OTHER; note = 5'-methyluridine-3'-phosphate
agcagcctaaggacatagagtgc

SEQ ID NO: 3077 - RNA, 23 nt, synthetic construct
  source 1..23: mol_type = other RNA
  modified_base 6: mod_base = OTHER; note = 5'-methyluridine-3'-phosphate
  modified_base 13: mod_base = OTHER; note = 5'-methyluridine-3'-phosphate
  modified_base 22: mod_base = OTHER; note = 5'-methyluridine-3'-phosphate
ccaactggaccctggcacaggtg

SEQ ID NO: 3078 - RNA, 23 nt, synthetic construct
  source 1..23: mol_type = other RNA
  modified_base 4: mod_base = OTHER; note = 5'-methyluridine-3'-phosphate
  modified_base 9: mod_base = OTHER; note = 5'-methyluridine-3'-phosphate
  modified_base 11: mod_base = OTHER; note = 5'-methyluridine-3'-phosphate
  modified_base 16: mod_base = OTHER; note = 5'-methyluridine-3'-phosphate
  modified_base 21: mod_base = OTHER; note = 5'-methyluridine-3'-phosphate
  modified_base 22: mod_base = OTHER; note = 5'-methyluridine-3'-phosphate
aggtgcactgtgacgtccacttc

SEQ ID NO: 3079 - RNA, 23 nt, synthetic construct
  source 1..23: mol_type = other RNA
  modified_base 2: mod_base = OTHER; note = 5'-methyluridine-3'-phosphate
  modified_base 4: mod_base = OTHER; note = 5'-methyluridine-3'-phosphate
  modified_base 13: mod_base = OTHER; note = 5'-methyluridine-3'-phosphate
gtgtgcaggaactgggagcagga

SEQ ID NO: 3080 - RNA, 23 nt, synthetic construct
  source 1..23: mol_type = other RNA
  modified_base 5: mod_base = OTHER; note = 5'-methyluridine-3'-phosphate
  modified_base 7: mod_base = OTHER; note = 5'-methyluridine-3'-phosphate
  modified_base 8: mod_base = OTHER; note = 5'-methyluridine-3'-phosphate
  modified_base 14: mod_base = OTHER; note = 5'-methyluridine-3'-phosphate
  modified_base 16: mod_base = OTHER; note = 5'-methyluridine-3'-phosphate
  modified_base 19: mod_base = OTHER; note = 5'-methyluridine-3'-phosphate
ggcgtcttcaagatgtgctacaa

SEQ ID NO: 3081 - RNA, 23 nt, synthetic construct
  source 1..23: mol_type = other RNA
  modified_base 2: mod_base = OTHER; note = 5'-methyluridine-3'-phosphate
  modified_base 4: mod_base = OTHER; note = 5'-methyluridine-3'-phosphate
  modified_base 7: mod_base = OTHER; note = 5'-methyluridine-3'-phosphate
  modified_base 12: mod_base = OTHER; note = 5'-methyluridine-3'-phosphate
  modified_base 22: mod_base = OTHER; note = 5'-methyluridine-3'-phosphate
ctctgctgcagtgacgaccactg

SEQ ID NO: 3082 - RNA, 23 nt, synthetic construct
  source 1..23: mol_type = other RNA
  modified_base 15: mod_base = OTHER; note = 5'-methyluridine-3'-phosphate
accgaccacagagctggagacgg

SEQ ID NO: 3083 - RNA, 23 nt, synthetic construct
  source 1..23: mol_type = other RNA
  modified_base 7: mod_base = OTHER; note = 5'-methyluridine-3'-phosphate
  modified_base 9: mod_base = OTHER; note = 5'-methyluridine-3'-phosphate
  modified_base 10: mod_base = OTHER; note = 5'-methyluridine-3'-phosphate
  modified_base 12: mod_base = OTHER; note = 5'-methyluridine-3'-phosphate
aggccctgttctcaacgccgcag

SEQ ID NO: 3084 - RNA, 23 nt, synthetic construct
  source 1..23: mol_type = other RNA
  modified_base 5: mod_base = OTHER; note = 5'-methyluridine-3'-phosphate
  modified_base 7: mod_base = OTHER; note = 5'-methyluridine-3'-phosphate
  modified_base 17: mod_base = OTHER; note = 5'-methyluridine-3'-phosphate
  modified_base 22: mod_base = OTHER; note = 5'-methyluridine-3'-phosphate
accctctcagaaggactgacatc

SEQ ID NO: 3085 - RNA, 23 nt, synthetic construct
  source 1..23: mol_type = other RNA
  modified_base 7: mod_base = OTHER; note = 5'-methyluridine-3'-phosphate
  modified_base 20: mod_base = OTHER; note = 5'-methyluridine-3'-phosphate
  modified_base 21: mod_base = OTHER; note = 5'-methyluridine-3'-phosphate
cccagatacacaagcacccttgg

SEQ ID NO: 3086 - RNA, 23 nt, synthetic construct
  source 1..23: mol_type = other RNA
  modified_base 5: mod_base = OTHER; note = 5'-methyluridine-3'-phosphate
  modified_base 19: mod_base = OTHER; note = 5'-methyluridine-3'-phosphate
  modified_base 21: mod_base = OTHER; note = 5'-methyluridine-3'-phosphate
aggctccacagaacccactgtcc

SEQ ID NO: 3087 - RNA, 23 nt, synthetic construct
  source 1..23: mol_type = other RNA
  modified_base 1: mod_base = OTHER; note = 5'-methyluridine-3'-phosphate
  modified_base 8: mod_base = OTHER; note = 5'-methyluridine-3'-phosphate
  modified_base 9: mod_base = OTHER; note = 5'-methyluridine-3'-phosphate
  modified_base 19: mod_base = OTHER; note = 5'-methyluridine-3'-phosphate
tccacccttccaacacgctcagc

SEQ ID NO: 3088 - RNA, 23 nt, synthetic construct
  source 1..23: mol_type = other RNA
  modified_base 12: mod_base = OTHER; note = 5'-methyluridine-3'-phosphate
  modified_base 20: mod_base = OTHER; note = 5'-methyluridine-3'-phosphate
cccaacaacaatggcaacctcca

SEQ ID NO: 3089 - RNA, 23 nt, synthetic construct
  source 1..23: mol_type = other RNA
  modified_base 6: mod_base = OTHER; note = 5'-methyluridine-3'-phosphate
  modified_base 7: mod_base = OTHER; note = 5'-methyluridine-3'-phosphate
  modified_base 20: mod_base = OTHER; note = 5'-methyluridine-3'-phosphate
accgcttccaaagagccgctgac

SEQ ID NO: 3090 - RNA, 23 nt, synthetic construct
  source 1..23: mol_type = other RNA
  modified_base 1: mod_base = OTHER; note = 5'-methyluridine-3'-phosphate
  modified_base 13: mod_base = OTHER; note = 5'-methyluridine-3'-phosphate
tggcgccaacactcacgagcgag

SEQ ID NO: 3091 - RNA, 23 nt, synthetic construct
  source 1..23: mol_type = other RNA
  modified_base 2: mod_base = OTHER; note = 5'-methyluridine-3'-phosphate
  modified_base 4: mod_base = OTHER; note = 5'-methyluridine-3'-phosphate
  modified_base 10: mod_base = OTHER; note = 5'-methyluridine-3'-phosphate
  modified_base 12: mod_base = OTHER; note = 5'-methyluridine-3'-phosphate
ctgtccacctctcaggccgagac

SEQ ID NO: 3092 - RNA, 23 nt, synthetic construct
  source 1..23: mol_type = other RNA
  modified_base 20: mod_base = OTHER; note = 5'-methyluridine-3'-phosphate
cccaggacagagacgacaatgag

SEQ ID NO: 3093 - RNA, 23 nt, synthetic construct
  source 1..23: mol_type = other RNA
  modified_base 4: mod_base = OTHER; note = 5'-methyluridine-3'-phosphate
  modified_base 5: mod_base = OTHER; note = 5'-methyluridine-3'-phosphate
  modified_base 9: mod_base = OTHER; note = 5'-methyluridine-3'-phosphate
cccttgactaacaccaccaccag

SEQ ID NO: 3094 - RNA, 23 nt, synthetic construct
  source 1..23: mol_type = other RNA
  modified_base 4: mod_base = OTHER; note = 5'-methyluridine-3'-phosphate
  modified_base 6: mod_base = OTHER; note = 5'-methyluridine-3'-phosphate
  modified_base 16: mod_base = OTHER; note = 5'-methyluridine-3'-phosphate
  modified_base 18: mod_base = OTHER; note = 5'-methyluridine-3'-phosphate
  modified_base 22: mod_base = OTHER; note = 5'-methyluridine-3'-phosphate
cgctgtcaaccgaagtgtgagtg

SEQ ID NO: 3095 - RNA, 23 nt, synthetic construct
  source 1..23: mol_type = other RNA
  modified_base 7: mod_base = OTHER; note = 5'-methyluridine-3'-phosphate
  modified_base 10: mod_base = OTHER; note = 5'-methyluridine-3'-phosphate
  modified_base 11: mod_base = OTHER; note = 5'-methyluridine-3'-phosphate
  modified_base 12: mod_base = OTHER; note = 5'-methyluridine-3'-phosphate
  modified_base 17: mod_base = OTHER; note = 5'-methyluridine-3'-phosphate
  modified_base 22: mod_base = OTHER; note = 5'-methyluridine-3'-phosphate
  modified_base 23: mod_base = OTHER; note = 5'-methyluridine
acagagtggtttgacgtggactt

SEQ ID NO: 3096 - RNA, 23 nt, synthetic construct
  source 1..23: mol_type = other RNA
  modified_base 2: mod_base = OTHER; note = 5'-methyluridine-3'-phosphate
  modified_base 9: mod_base = OTHER; note = 5'-methyluridine-3'-phosphate
  modified_base 10: mod_base = OTHER; note = 5'-methyluridine-3'-phosphate
  modified_base 11: mod_base = OTHER; note = 5'-methyluridine-3'-phosphate
  modified_base 12: mod_base = OTHER; note = 5'-methyluridine-3'-phosphate
  modified_base 20: mod_base = OTHER; note = 5'-methyluridine-3'-phosphate
atggaaacttttgaaaacatcag

SEQ ID NO: 3097 - RNA, 23 nt, synthetic construct
  source 1..23: mol_type = other RNA
  modified_base 16: mod_base = OTHER; note = 5'-methyluridine-3'-phosphate
  modified_base 21: mod_base = OTHER; note = 5'-methyluridine-3'-phosphate
gggcaccaaagagcatagagtgc

SEQ ID NO: 3098 - RNA, 23 nt, synthetic construct
  source 1..23: mol_type = other RNA
  modified_base 8: mod_base = OTHER; note = 5'-methyluridine-3'-phosphate
  modified_base 14: mod_base = OTHER; note = 5'-methyluridine-3'-phosphate
  modified_base 23: mod_base = OTHER; note = 5'-methyluridine
cccgaggtaagcatcgaccaggt

SEQ ID NO: 3099 - RNA, 23 nt, synthetic construct
  source 1..23: mol_type = other RNA
  modified_base 1: mod_base = OTHER; note = 5'-methyluridine-3'-phosphate
  modified_base 4: mod_base = OTHER; note = 5'-methyluridine-3'-phosphate
  modified_base 9: mod_base = OTHER; note = 5'-methyluridine-3'-phosphate
  modified_base 16: mod_base = OTHER; note = 5'-methyluridine-3'-phosphate
tgctgacctgcagcctggagacg

SEQ ID NO: 3100 - RNA, 23 nt, synthetic construct
  source 1..23: mol_type = other RNA
  modified_base 4: mod_base = OTHER; note = 5'-methyluridine-3'-phosphate
acctgcaagaacgaagaccagac

SEQ ID NO: 3101 - RNA, 23 nt, synthetic construct
  source 1..23: mol_type = other RNA
  modified_base 1: mod_base = OTHER; note = 5'-methyluridine-3'-phosphate
  modified_base 3: mod_base = OTHER; note = 5'-methyluridine-3'-phosphate
  modified_base 6: mod_base = OTHER; note = 5'-methyluridine-3'-phosphate
  modified_base 7: mod_base = OTHER; note = 5'-methyluridine-3'-phosphate
  modified_base 12: mod_base = OTHER; note = 5'-methyluridine-3'-phosphate
  modified_base 19: mod_base = OTHER; note = 5'-methyluridine-3'-phosphate
  modified_base 23: mod_base = OTHER; note = 5'-methyluridine
tgtgcttcaactacaacgtgcgt

SEQ ID NO: 3102 - RNA, 23 nt, synthetic construct
  source 1..23: mol_type = other RNA
  modified_base 2: mod_base = OTHER; note = 5'-methyluridine-3'-phosphate
  modified_base 3: mod_base = OTHER; note = 5'-methyluridine-3'-phosphate
  modified_base 4: mod_base = OTHER; note = 5'-methyluridine-3'-phosphate
  modified_base 7: mod_base = OTHER; note = 5'-methyluridine-3'-phosphate
  modified_base 9: mod_base = OTHER; note = 5'-methyluridine-3'-phosphate
  modified_base 16: mod_base = OTHER; note = 5'-methyluridine-3'-phosphate
ctttgctgtgacgactacagcca

SEQ ID NO: 3103 - RNA, 23 nt, synthetic construct
  source 1..23: mol_type = other RNA
  modified_base 10: mod_base = OTHER; note = 5'-methyluridine-3'-phosphate
  modified_base 14: mod_base = OTHER; note = 5'-methyluridine-3'-phosphate
  modified_base 17: mod_base = OTHER; note = 5'-methyluridine-3'-phosphate
gggacgacctggatcctcacaaa

SEQ ID NO: 3104 - RNA, 23 nt, synthetic construct
  source 1..23: mol_type = other RNA
  modified_base 19: mod_base = OTHER; note = 5'-methyluridine-3'-phosphate
gccgaccacaacagccactacga

SEQ ID NO: 3105 - RNA, 23 nt, synthetic construct
  source 1..23: mol_type = other RNA
  modified_base 3: mod_base = OTHER; note = 5'-methyluridine-3'-phosphate
  modified_base 10: mod_base = OTHER; note = 5'-methyluridine-3'-phosphate
  modified_base 20: mod_base = OTHER; note = 5'-methyluridine-3'-phosphate
cctccaccctgagaacagctccc

SEQ ID NO: 3106 - RNA, 23 nt, synthetic construct
  source 1..23: mol_type = other RNA
  modified_base 3: mod_base = OTHER; note = 5'-methyluridine-3'-phosphate
  modified_base 11: mod_base = OTHER; note = 5'-methyluridine-3'-phosphate
  modified_base 14: mod_base = OTHER; note = 5'-methyluridine-3'-phosphate
cctcccaaagtgctgaccaccac

SEQ ID NO: 3107 - RNA, 23 nt, synthetic construct
  source 1..23: mol_type = other RNA
  modified_base 7: mod_base = OTHER; note = 5'-methyluridine-3'-phosphate
  modified_base 18: mod_base = OTHER; note = 5'-methyluridine-3'-phosphate
  modified_base 22: mod_base = OTHER; note = 5'-methyluridine-3'-phosphate
accagctccaaagccactccctc

SEQ ID NO: 3108 - RNA, 23 nt, synthetic construct
  source 1..23: mol_type = other RNA
  modified_base 2: mod_base = OTHER; note = 5'-methyluridine-3'-phosphate
  modified_base 7: mod_base = OTHER; note = 5'-methyluridine-3'-phosphate
  modified_base 16: mod_base = OTHER; note = 5'-methyluridine-3'-phosphate
ctccagtccagggactgcaaccg

SEQ ID NO: 3109 - RNA, 23 nt, synthetic construct
  source 1..23: mol_type = other RNA
  modified_base 8: mod_base = OTHER; note = 5'-methyluridine-3'-phosphate
ccagcactgagaagcacagccac

SEQ ID NO: 3110 - RNA, 23 nt, synthetic construct
  source 1..23: mol_type = other RNA
  modified_base 4: mod_base = OTHER; note = 5'-methyluridine-3'-phosphate
  modified_base 12: mod_base = OTHER; note = 5'-methyluridine-3'-phosphate
  modified_base 13: mod_base = OTHER; note = 5'-methyluridine-3'-phosphate
  modified_base 21: mod_base = OTHER; note = 5'-methyluridine-3'-phosphate
agctaccagcgttacacccatcc

SEQ ID NO: 3111 - RNA, 23 nt, synthetic construct
  source 1..23: mol_type = other RNA
  modified_base 1: mod_base = OTHER; note = 5'-methyluridine-3'-phosphate
  modified_base 3: mod_base = OTHER; note = 5'-methyluridine-3'-phosphate
  modified_base 4: mod_base = OTHER; note = 5'-methyluridine-3'-phosphate
  modified_base 7: mod_base = OTHER; note = 5'-methyluridine-3'-phosphate
  modified_base 11: mod_base = OTHER; note = 5'-methyluridine-3'-phosphate
  modified_base 22: mod_base = OTHER; note = 5'-methyluridine-3'-phosphate
tcttcctccctgggcaccacctg

SEQ ID NO: 3112 - RNA, 23 nt, synthetic construct
  source 1..23: mol_type = other RNA
  modified_base 5: mod_base = OTHER; note = 5'-methyluridine-3'-phosphate
  modified_base 7: mod_base = OTHER; note = 5'-methyluridine-3'-phosphate
cgcctatcacagaccaccacacc

SEQ ID NO: 3113 - RNA, 23 nt, synthetic construct
  source 1..23: mol_type = other RNA
  modified_base 9: mod_base = OTHER; note = 5'-methyluridine-3'-phosphate
  modified_base 11: mod_base = OTHER; note = 5'-methyluridine-3'-phosphate
ggccaccatgtccacagccacac

SEQ ID NO: 3114 - RNA, 23 nt, synthetic construct
  source 1..23: mol_type = other RNA
  modified_base 3: mod_base = OTHER; note = 5'-methyluridine-3'-phosphate
  modified_base 6: mod_base = OTHER; note = 5'-methyluridine-3'-phosphate
  modified_base 11: mod_base = OTHER; note = 5'-methyluridine-3'-phosphate
  modified_base 20: mod_base = OTHER; note = 5'-methyluridine-3'-phosphate
cctcctccactccagagactgcc

SEQ ID NO: 3115 - RNA, 23 nt, synthetic construct
  source 1..23: mol_type = other RNA
  modified_base 4: mod_base = OTHER; note = 5'-methyluridine-3'-phosphate
  modified_base 11: mod_base = OTHER; note = 5'-methyluridine-3'-phosphate
  modified_base 14: mod_base = OTHER; note = 5'-methyluridine-3'-phosphate
  modified_base 15: mod_base = OTHER; note = 5'-methyluridine-3'-phosphate
acctccacagtgcttaccgccac

SEQ ID NO: 3116 - RNA, 23 nt, synthetic construct
  source 1..23: mol_type = other RNA
  modified_base 13: mod_base = OTHER; note = 5'-methyluridine-3'-phosphate
  modified_base 19: mod_base = OTHER; note = 5'-methyluridine-3'-phosphate
cccaggaacagctcacactacca

SEQ ID NO: 3117 - RNA, 23 nt, synthetic construct
  source 1..23: mol_type = other RNA
  modified_base 3: mod_base = OTHER; note = 5'-methyluridine-3'-phosphate
  modified_base 10: mod_base = OTHER; note = 5'-methyluridine-3'-phosphate
agtgccaactaccacaaccacgg

SEQ ID NO: 3118 - RNA, 23 nt, synthetic construct
  source 1..23: mol_type = other RNA
  modified_base 3: mod_base = OTHER; note = 5'-methyluridine-3'-phosphate
  modified_base 8: mod_base = OTHER; note = 5'-methyluridine-3'-phosphate
  modified_base 10: mod_base = OTHER; note = 5'-methyluridine-3'-phosphate
  modified_base 14: mod_base = OTHER; note = 5'-methyluridine-3'-phosphate
cctccagtgtggatcagcacaac

SEQ ID NO: 3119 - RNA, 23 nt, synthetic construct
  source 1..23: mol_type = other RNA
  modified_base 19: mod_base = OTHER; note = 5'-methyluridine-3'-phosphate
acacccacaaccagaggctccac

SEQ ID NO: 3120 - RNA, 23 nt, synthetic construct
  source 1..23: mol_type = other RNA
  modified_base 11: mod_base = OTHER; note = 5'-methyluridine-3'-phosphate
  modified_base 14: mod_base = OTHER; note = 5'-methyluridine-3'-phosphate
accgccacagtgctgaccaccac

SEQ ID NO: 3121 - RNA, 23 nt, synthetic construct
  source 1..23: mol_type = other RNA
  modified_base 1: mod_base = OTHER; note = 5'-methyluridine-3'-phosphate
  modified_base 8: mod_base = OTHER; note = 5'-methyluridine-3'-phosphate
  modified_base 11: mod_base = OTHER; note = 5'-methyluridine-3'-phosphate
  modified_base 12: mod_base = OTHER; note = 5'-methyluridine-3'-phosphate
  modified_base 14: mod_base = OTHER; note = 5'-methyluridine-3'-phosphate
  modified_base 16: mod_base = OTHER; note = 5'-methyluridine-3'-phosphate
tggccactggttctatggcaaca

SEQ ID NO: 3122 - RNA, 23 nt, synthetic construct
  source 1..23: mol_type = other RNA
  modified_base 4: mod_base = OTHER; note = 5'-methyluridine-3'-phosphate
  modified_base 7: mod_base = OTHER; note = 5'-methyluridine-3'-phosphate
  modified_base 9: mod_base = OTHER; note = 5'-methyluridine-3'-phosphate
ccctcctctagcacacagaccag

SEQ ID NO: 3123 - RNA, 23 nt, synthetic construct
  source 1..23: mol_type = other RNA
  modified_base 9: mod_base = OTHER; note = 5'-methyluridine-3'-phosphate
  modified_base 14: mod_base = OTHER; note = 5'-methyluridine-3'-phosphate
acggccactacgatcacggccac

SEQ ID NO: 3124 - RNA, 23 nt, synthetic construct
  source 1..23: mol_type = other RNA
  modified_base 4: mod_base = OTHER; note = 5'-methyluridine-3'-phosphate
  modified_base 7: mod_base = OTHER; note = 5'-methyluridine-3'-phosphate
  modified_base 12: mod_base = OTHER; note = 5'-methyluridine-3'-phosphate
  modified_base 15: mod_base = OTHER; note = 5'-methyluridine-3'-phosphate
ccctcctcaactcctgggacaac

SEQ ID NO: 3125 - RNA, 23 nt, synthetic construct
  source 1..23: mol_type = other RNA
  modified_base 14: mod_base = OTHER; note = 5'-methyluridine-3'-phosphate
  modified_base 18: mod_base = OTHER; note = 5'-methyluridine-3'-phosphate
  modified_base 22: mod_base = OTHER; note = 5'-methyluridine-3'-phosphate
accagcaacacagtgactccctc

SEQ ID NO: 3126 - RNA, 23 nt, synthetic construct
  source 1..23: mol_type = other RNA
  modified_base 1: mod_base = OTHER; note = 5'-methyluridine-3'-phosphate
  modified_base 3: mod_base = OTHER; note = 5'-methyluridine-3'-phosphate
  modified_base 8: mod_base = OTHER; note = 5'-methyluridine-3'-phosphate
tctgccctagggaccacccacac

SEQ ID NO: 3127 - RNA, 23 nt, synthetic construct
  source 1..23: mol_type = other RNA
  modified_base 5: mod_base = OTHER; note = 5'-methyluridine-3'-phosphate
  modified_base 17: mod_base = OTHER; note = 5'-methyluridine-3'-phosphate
ccagtgccgaacaccatggccac

SEQ ID NO: 3128 - RNA, 23 nt, synthetic construct
  source 1..23: mol_type = other RNA
  modified_base 7: mod_base = OTHER; note = 5'-methyluridine-3'-phosphate
  modified_base 12: mod_base = OTHER; note = 5'-methyluridine-3'-phosphate
  modified_base 13: mod_base = OTHER; note = 5'-methyluridine-3'-phosphate
  modified_base 22: mod_base = OTHER; note = 5'-methyluridine-3'-phosphate
acagcctggacttcggccacctc

SEQ ID NO: 3129 - RNA, 23 nt, synthetic construct
  source 1..23: mol_type = other RNA
  modified_base 10: mod_base = OTHER; note = 5'-methyluridine-3'-phosphate
  modified_base 20: mod_base = OTHER; note = 5'-methyluridine-3'-phosphate
  modified_base 21: mod_base = OTHER; note = 5'-methyluridine-3'-phosphate
ccacccacatcacagagccttcc

SEQ ID NO: 3130 - RNA, 23 nt, synthetic construct
  source 1..23: mol_type = other RNA
  modified_base 5: mod_base = OTHER; note = 5'-methyluridine-3'-phosphate
  modified_base 9: mod_base = OTHER; note = 5'-methyluridine-3'-phosphate
  modified_base 10: mod_base = OTHER; note = 5'-methyluridine-3'-phosphate
  modified_base 20: mod_base = OTHER; note = 5'-methyluridine-3'-phosphate
acggtgacttcccacaccctagc

SEQ ID NO: 3131 - RNA, 23 nt, synthetic construct
  source 1..23: mol_type = other RNA
  modified_base 13: mod_base = OTHER; note = 5'-methyluridine-3'-phosphate
agcaaccaccggtaccacccagc

SEQ ID NO: 3132 - RNA, 23 nt, synthetic construct
  source 1..23: mol_type = other RNA
  modified_base 2: mod_base = OTHER; note = 5'-methyluridine-3'-phosphate
  modified_base 7: mod_base = OTHER; note = 5'-methyluridine-3'-phosphate
  modified_base 15: mod_base = OTHER; note = 5'-methyluridine-3'-phosphate
  modified_base 16: mod_base = OTHER; note = 5'-methyluridine-3'-phosphate
  modified_base 17: mod_base = OTHER; note = 5'-methyluridine-3'-phosphate
ctcgactccagccctttccagcc

SEQ ID NO: 3133 - RNA, 23 nt, synthetic construct
  source 1..23: mol_type = other RNA
  modified_base 3: mod_base = OTHER; note = 5'-methyluridine-3'-phosphate
  modified_base 22: mod_base = OTHER; note = 5'-methyluridine-3'-phosphate
cctagcagcagaaccaccgagtc

SEQ ID NO: 3134 - RNA, 23 nt, synthetic construct
  source 1..23: mol_type = other RNA
  modified_base 22: mod_base = OTHER; note = 5'-methyluridine-3'-phosphate
acacccagcaagacccgcacctc

SEQ ID NO: 3135 - RNA, 23 nt, synthetic construct
  source 1..23: mol_type = other RNA
  modified_base 6: mod_base = OTHER; note = 5'-methyluridine-3'-phosphate
  modified_base 9: mod_base = OTHER; note = 5'-methyluridine-3'-phosphate
  modified_base 15: mod_base = OTHER; note = 5'-methyluridine-3'-phosphate
  modified_base 20: mod_base = OTHER; note = 5'-methyluridine-3'-phosphate
  modified_base 22: mod_base = OTHER; note = 5'-methyluridine-3'-phosphate
cacggtggtgaccatgggctgtg

SEQ ID NO: 3136 - RNA, 23 nt, synthetic construct
  source 1..23: mol_type = other RNA
  modified_base 4: mod_base = OTHER; note = 5'-methyluridine-3'-phosphate
  modified_base 8: mod_base = OTHER; note = 5'-methyluridine-3'-phosphate
  modified_base 13: mod_base = OTHER; note = 5'-methyluridine-3'-phosphate
  modified_base 19: mod_base = OTHER; note = 5'-methyluridine-3'-phosphate
gagtggctggactacagctaccc

SEQ ID NO: 3137 - RNA, 23 nt, synthetic construct
  source 1..23: mol_type = other RNA
  modified_base 2: mod_base = OTHER; note = 5'-methyluridine-3'-phosphate
  modified_base 3: mod_base = OTHER; note = 5'-methyluridine-3'-phosphate
  modified_base 4: mod_base = OTHER; note = 5'-methyluridine-3'-phosphate
  modified_base 11: mod_base = OTHER; note = 5'-methyluridine-3'-phosphate
  modified_base 14: mod_base = OTHER; note = 5'-methyluridine-3'-phosphate
  modified_base 21: mod_base = OTHER; note = 5'-methyluridine-3'-phosphate
ctttgacacctactccaacatcc

SEQ ID NO: 3138 - RNA, 23 nt, synthetic construct
  source 1..23: mol_type = other RNA
  modified_base 3: mod_base = OTHER; note = 5'-methyluridine-3'-phosphate
  modified_base 4: mod_base = OTHER; note = 5'-methyluridine-3'-phosphate
  modified_base 13: mod_base = OTHER; note = 5'-methyluridine-3'-phosphate
  modified_base 16: mod_base = OTHER; note = 5'-methyluridine-3'-phosphate
  modified_base 21: mod_base = OTHER; note = 5'-methyluridine-3'-phosphate
agttgggccaggtcgtggaatgc

SEQ ID NO: 3139 - RNA, 23 nt, synthetic construct
  source 1..23: mol_type = other RNA
  modified_base 5: mod_base = OTHER; note = 5'-methyluridine-3'-phosphate
  modified_base 10: mod_base = OTHER; note = 5'-methyluridine-3'-phosphate
  modified_base 11: mod_base = OTHER; note = 5'-methyluridine-3'-phosphate
  modified_base 12: mod_base = OTHER; note = 5'-methyluridine-3'-phosphate
  modified_base 17: mod_base = OTHER; note = 5'-methyluridine-3'-phosphate
  modified_base 20: mod_base = OTHER; note = 5'-methyluridine-3'-phosphate
  modified_base 22: mod_base = OTHER; note = 5'-methyluridine-3'-phosphate
agcctggactttggcctggtctg

SEQ ID NO: 3140 - RNA, 23 nt, synthetic construct
  source 1..23: mol_type = other RNA
  modified_base 4: mod_base = OTHER; note = 5'-methyluridine-3'-phosphate
  modified_base 6: mod_base = OTHER; note = 5'-methyluridine-3'-phosphate
  modified_base 9: mod_base = OTHER; note = 5'-methyluridine-3'-phosphate
  modified_base 10: mod_base = OTHER; note = 5'-methyluridine-3'-phosphate
  modified_base 15: mod_base = OTHER; note = 5'-methyluridine-3'-phosphate
  modified_base 17: mod_base = OTHER; note = 5'-methyluridine-3'-phosphate
  modified_base 22: mod_base = OTHER; note = 5'-methyluridine-3'-phosphate
agatgtgcttcaactatgaaatc

SEQ ID NO: 3141 - RNA, 23 nt, synthetic construct
  source 1..23: mol_type = other RNA
  modified_base 3: mod_base = OTHER; note = 5'-methyluridine-3'-phosphate
  modified_base 5: mod_base = OTHER; note = 5'-methyluridine-3'-phosphate
  modified_base 7: mod_base = OTHER; note = 5'-methyluridine-3'-phosphate
  modified_base 8: mod_base = OTHER; note = 5'-methyluridine-3'-phosphate
  modified_base 10: mod_base = OTHER; note = 5'-methyluridine-3'-phosphate
  modified_base 13: mod_base = OTHER; note = 5'-methyluridine-3'-phosphate
  modified_base 19: mod_base = OTHER; note = 5'-methyluridine-3'-phosphate
cgtgtgttctgctgcaactacgg

SEQ ID NO: 3142 - RNA, 23 nt, synthetic construct
  source 1..23: mol_type = other RNA
  modified_base 7: mod_base = OTHER; note = 5'-methyluridine-3'-phosphate
  modified_base 9: mod_base = OTHER; note = 5'-methyluridine-3'-phosphate
  modified_base 17: mod_base = OTHER; note = 5'-methyluridine-3'-phosphate
  modified_base 22: mod_base = OTHER; note = 5'-methyluridine-3'-phosphate
accagctctacggccatgccctc

SEQ ID NO: 3143 - RNA, 23 nt, synthetic construct
  source 1..23: mol_type = other RNA
  modified_base 4: mod_base = OTHER; note = 5'-methyluridine-3'-phosphate
  modified_base 7: mod_base = OTHER; note = 5'-methyluridine-3'-phosphate
  modified_base 16: mod_base = OTHER; note = 5'-methyluridine-3'-phosphate
ggatcctcacagagctgaccaca

SEQ ID NO: 3144 - RNA, 23 nt, synthetic construct
  source 1..23: mol_type = other RNA
  modified_base 7: mod_base = OTHER; note = 5'-methyluridine-3'-phosphate
  modified_base 13: mod_base = OTHER; note = 5'-methyluridine-3'-phosphate
  modified_base 17: mod_base = OTHER; note = 5'-methyluridine-3'-phosphate
  modified_base 22: mod_base = OTHER; note = 5'-methyluridine-3'-phosphate
agccactacgactgagtccactg

SEQ ID NO: 3145 - RNA, 23 nt, synthetic construct
  source 1..23: mol_type = other RNA
  modified_base 10: mod_base = OTHER; note = 5'-methyluridine-3'-phosphate
  modified_base 14: mod_base = OTHER; note = 5'-methyluridine-3'-phosphate
  modified_base 17: mod_base = OTHER; note = 5'-methyluridine-3'-phosphate
gggaccacctggatcctcacaga

SEQ ID NO: 3146 - RNA, 23 nt, synthetic construct
  source 1..23: mol_type = other RNA
  modified_base 9: mod_base = OTHER; note = 5'-methyluridine-3'-phosphate
  modified_base 20: mod_base = OTHER; note = 5'-methyluridine-3'-phosphate
ccgagcactacagccaccgtgac

SEQ ID NO: 3147 - RNA, 23 nt, synthetic construct
  source 1..23: mol_type = other RNA
  modified_base 2: mod_base = OTHER; note = 5'-methyluridine-3'-phosphate
  modified_base 5: mod_base = OTHER; note = 5'-methyluridine-3'-phosphate
  modified_base 19: mod_base = OTHER; note = 5'-methyluridine-3'-phosphate
  modified_base 22: mod_base = OTHER; note = 5'-methyluridine-3'-phosphate
ctcctccacccaggcaactgctg

SEQ ID NO: 3148 - RNA, 23 nt, synthetic construct
  source 1..23: mol_type = other RNA
  modified_base 20: mod_base = OTHER; note = 5'-methyluridine-3'-phosphate
acggccacgacacccacagtcac

SEQ ID NO: 3149 - RNA, 23 nt, synthetic construct
  source 1..23: mol_type = other RNA
  modified_base 5: mod_base = OTHER; note = 5'-methyluridine-3'-phosphate
  modified_base 16: mod_base = OTHER; note = 5'-methyluridine-3'-phosphate
  modified_base 20: mod_base = OTHER; note = 5'-methyluridine-3'-phosphate
  modified_base 21: mod_base = OTHER; note = 5'-methyluridine-3'-phosphate
  modified_base 23: mod_base = OTHER; note = 5'-methyluridine
cagctccaaagccactcccttct

SEQ ID NO: 3150 - RNA, 23 nt, synthetic construct
  source 1..23: mol_type = other RNA
  modified_base 8: mod_base = OTHER; note = 5'-methyluridine-3'-phosphate
  modified_base 15: mod_base = OTHER; note = 5'-methyluridine-3'-phosphate
  modified_base 16: mod_base = OTHER; note = 5'-methyluridine-3'-phosphate
  modified_base 17: mod_base = OTHER; note = 5'-methyluridine-3'-phosphate
ccacagctaccagctttacagcc

SEQ ID NO: 3151 - RNA, 23 nt, synthetic construct
  source 1..23: mol_type = other RNA
  modified_base 3: mod_base = OTHER; note = 5'-methyluridine-3'-phosphate
  modified_base 6: mod_base = OTHER; note = 5'-methyluridine-3'-phosphate
  modified_base 11: mod_base = OTHER; note = 5'-methyluridine-3'-phosphate
  modified_base 20: mod_base = OTHER; note = 5'-methyluridine-3'-phosphate
  modified_base 22: mod_base = OTHER; note = 5'-methyluridine-3'-phosphate
cctcctccactccagagactgtc

SEQ ID NO: 3152 - RNA, 23 nt, synthetic construct
  source 1..23: mol_type = other RNA
  modified_base 2: mod_base = OTHER; note = 5'-methyluridine-3'-phosphate
  modified_base 9: mod_base = OTHER; note = 5'-methyluridine-3'-phosphate
  modified_base 12: mod_base = OTHER; note = 5'-methyluridine-3'-phosphate
  modified_base 13: mod_base = OTHER; note = 5'-methyluridine-3'-phosphate
ctccacagtgcttaccaccacgg

SEQ ID NO: 3153 - RNA, 23 nt, synthetic construct
  source 1..23: mol_type = other RNA
  modified_base 5: mod_base = OTHER; note = 5'-methyluridine-3'-phosphate
  modified_base 11: mod_base = OTHER; note = 5'-methyluridine-3'-phosphate
  modified_base 19: mod_base = OTHER; note = 5'-methyluridine-3'-phosphate
  modified_base 22: mod_base = OTHER; note = 5'-methyluridine-3'-phosphate
cagctcacactaccaaagtgctg

SEQ ID NO: 3154 - RNA, 23 nt, synthetic construct
  source 1..23: mol_type = other RNA
  modified_base 3: mod_base = OTHER; note = 5'-methyluridine-3'-phosphate
  modified_base 19: mod_base = OTHER; note = 5'-methyluridine-3'-phosphate
  modified_base 20: mod_base = OTHER; note = 5'-methyluridine-3'-phosphate
actaccacaaccacgggcttcac

SEQ ID NO: 3155 - RNA, 23 nt, synthetic construct
  source 1..23: mol_type = other RNA
  modified_base 8: mod_base = OTHER; note = 5'-methyluridine-3'-phosphate
  modified_base 9: mod_base = OTHER; note = 5'-methyluridine-3'-phosphate
  modified_base 14: mod_base = OTHER; note = 5'-methyluridine-3'-phosphate
  modified_base 16: mod_base = OTHER; note = 5'-methyluridine-3'-phosphate
  modified_base 20: mod_base = OTHER; note = 5'-methyluridine-3'-phosphate
cgcacgcttccagtgtggatcag

SEQ ID NO: 3156 - RNA, 23 nt, synthetic construct
  source 1..23: mol_type = other RNA
  modified_base 18: mod_base = OTHER; note = 5'-methyluridine-3'-phosphate
  modified_base 19: mod_base = OTHER; note = 5'-methyluridine-3'-phosphate
acacccacaaccagaggttccac

SEQ ID NO: 3157 - RNA, 23 nt, synthetic construct
  source 1..23: mol_type = other RNA
  modified_base 3: mod_base = OTHER; note = 5'-methyluridine-3'-phosphate
  modified_base 22: mod_base = OTHER; note = 5'-methyluridine-3'-phosphate
gctgaccaccaccaccacaactg

SEQ ID NO: 3158 - RNA, 23 nt, synthetic construct
  source 1..23: mol_type = other RNA
  modified_base 4: mod_base = OTHER; note = 5'-methyluridine-3'-phosphate
  modified_base 7: mod_base = OTHER; note = 5'-methyluridine-3'-phosphate
  modified_base 12: mod_base = OTHER; note = 5'-methyluridine-3'-phosphate
ccctcctcaactccagggacaac

SEQ ID NO: 3159 - RNA, 23 nt, synthetic construct
  source 1..23: mol_type = other RNA
  modified_base 14: mod_base = OTHER; note = 5'-methyluridine-3'-phosphate
  modified_base 18: mod_base = OTHER; note = 5'-methyluridine-3'-phosphate
  modified_base 22: mod_base = OTHER; note = 5'-methyluridine-3'-phosphate
accagcagcacagtgactccctc

SEQ ID NO: 3160 - RNA, 23 nt, synthetic construct
  source 1..23: mol_type = other RNA
  modified_base 16: mod_base = OTHER; note = 5'-methyluridine-3'-phosphate
  modified_base 20: mod_base = OTHER; note = 5'-methyluridine-3'-phosphate
  modified_base 22: mod_base = OTHER; note = 5'-methyluridine-3'-phosphate
accacacacgggcgatccctgtc

SEQ ID NO: 3161 - RNA, 23 nt, synthetic construct
  source 1..23: mol_type = other RNA
  modified_base 1: mod_base = OTHER; note = 5'-methyluridine-3'-phosphate
  modified_base 14: mod_base = OTHER; note = 5'-methyluridine-3'-phosphate
  modified_base 19: mod_base = OTHER; note = 5'-methyluridine-3'-phosphate
taccacccagcactcgactccag

SEQ ID NO: 3162 - RNA, 23 nt, synthetic construct
  source 1..23: mol_type = other RNA
  modified_base 1: mod_base = OTHER; note = 5'-methyluridine-3'-phosphate
  modified_base 9: mod_base = OTHER; note = 5'-methyluridine-3'-phosphate
  modified_base 15: mod_base = OTHER; note = 5'-methyluridine-3'-phosphate
tccagccctcaccctagcagcag

SEQ ID NO: 3163 - RNA, 23 nt, synthetic construct
  source 1..23: mol_type = other RNA
  modified_base 4: mod_base = OTHER; note = 5'-methyluridine-3'-phosphate
  modified_base 8: mod_base = OTHER; note = 5'-methyluridine-3'-phosphate
  modified_base 11: mod_base = OTHER; note = 5'-methyluridine-3'-phosphate
acctggatcctcacagagcagac

SEQ ID NO: 3164 - RNA, 23 nt, synthetic construct
  source 1..23: mol_type = other RNA
  modified_base 10: mod_base = OTHER; note = 5'-methyluridine-3'-phosphate
agcagccactacgaccgcaacca

SEQ ID NO: 3165 - RNA, 23 nt, synthetic construct
  source 1..23: mol_type = other RNA
  modified_base 3: mod_base = OTHER; note = 5'-methyluridine-3'-phosphate
  modified_base 11: mod_base = OTHER; note = 5'-methyluridine-3'-phosphate
  modified_base 14: mod_base = OTHER; note = 5'-methyluridine-3'-phosphate
cctcccaaagtgctgaccagcac

SEQ ID NO: 3166 - RNA, 23 nt, synthetic construct
  source 1..23: mol_type = other RNA
  modified_base 6: mod_base = OTHER; note = 5'-methyluridine-3'-phosphate
  modified_base 7: mod_base = OTHER; note = 5'-methyluridine-3'-phosphate
  modified_base 18: mod_base = OTHER; note = 5'-methyluridine-3'-phosphate
  modified_base 19: mod_base = OTHER; note = 5'-methyluridine-3'-phosphate
  modified_base 22: mod_base = OTHER; note = 5'-methyluridine-3'-phosphate
accagttccaaagccacttcctc

SEQ ID NO: 3167 - RNA, 23 nt, synthetic construct
  source 1..23: mol_type = other RNA
  modified_base 1: mod_base = OTHER; note = 5'-methyluridine-3'-phosphate
  modified_base 10: mod_base = OTHER; note = 5'-methyluridine-3'-phosphate
  modified_base 21: mod_base = OTHER; note = 5'-methyluridine-3'-phosphate
  modified_base 22: mod_base = OTHER; note = 5'-methyluridine-3'-phosphate
tccaaggactgcaaccacccttc

SEQ ID NO: 3168 - RNA, 23 nt, synthetic construct
  source 1..23: mol_type = other RNA
  modified_base 4: mod_base = OTHER; note = 5'-methyluridine-3'-phosphate
  modified_base 7: mod_base = OTHER; note = 5'-methyluridine-3'-phosphate
cagtgctgacaagcacagccacc

SEQ ID NO: 3169 - RNA, 23 nt, synthetic construct
  source 1..23: mol_type = other RNA
  modified_base 1: mod_base = OTHER; note = 5'-methyluridine-3'-phosphate
  modified_base 9: mod_base = OTHER; note = 5'-methyluridine-3'-phosphate
  modified_base 16: mod_base = OTHER; note = 5'-methyluridine-3'-phosphate
  modified_base 17: mod_base = OTHER; note = 5'-methyluridine-3'-phosphate
  modified_base 18: mod_base = OTHER; note = 5'-methyluridine-3'-phosphate
tccacagctaccagctttacacc

SEQ ID NO: 3170 - RNA, 23 nt, synthetic construct
  source 1..23: mol_type = other RNA
  modified_base 4: mod_base = OTHER; note = 5'-methyluridine-3'-phosphate
  modified_base 7: mod_base = OTHER; note = 5'-methyluridine-3'-phosphate
  modified_base 8: mod_base = OTHER; note = 5'-methyluridine-3'-phosphate
  modified_base 14: mod_base = OTHER; note = 5'-methyluridine-3'-phosphate
  modified_base 15: mod_base = OTHER; note = 5'-methyluridine-3'-phosphate
ccctccttcacccttgggaccac

SEQ ID NO: 3171 - RNA, 23 nt, synthetic construct
  source 1..23: mol_type = other RNA
  modified_base 2: mod_base = OTHER; note = 5'-methyluridine-3'-phosphate
ctcccagaacagaccaccacacc

SEQ ID NO: 3172 - RNA, 23 nt, synthetic construct
  source 1..23: mol_type = other RNA
  modified_base 8: mod_base = OTHER; note = 5'-methyluridine-3'-phosphate
  modified_base 10: mod_base = OTHER; note = 5'-methyluridine-3'-phosphate
  modified_base 17: mod_base = OTHER; note = 5'-methyluridine-3'-phosphate
gccaccatgtccacaatccaccc

SEQ ID NO: 3173 - RNA, 23 nt, synthetic construct
  source 1..23: mol_type = other RNA
  modified_base 4: mod_base = OTHER; note = 5'-methyluridine-3'-phosphate
  modified_base 11: mod_base = OTHER; note = 5'-methyluridine-3'-phosphate
  modified_base 14: mod_base = OTHER; note = 5'-methyluridine-3'-phosphate
acctccacagtgctgaccacgaa

SEQ ID NO: 3174 - RNA, 23 nt, synthetic construct
  source 1..23: mol_type = other RNA
  modified_base 12: mod_base = OTHER; note = 5'-methyluridine-3'-phosphate
  modified_base 13: mod_base = OTHER; note = 5'-methyluridine-3'-phosphate
  modified_base 17: mod_base = OTHER; note = 5'-methyluridine-3'-phosphate
  modified_base 19: mod_base = OTHER; note = 5'-methyluridine-3'-phosphate
agggccaccagttccatgtccac

SEQ ID NO: 3175 - RNA, 23 nt, synthetic construct
  source 1..23: mol_type = other RNA
  modified_base 7: mod_base = OTHER; note = 5'-methyluridine-3'-phosphate
  modified_base 13: mod_base = OTHER; note = 5'-methyluridine-3'-phosphate
  modified_base 22: mod_base = OTHER; note = 5'-methyluridine-3'-phosphate
agccactacaactgcagccactg

SEQ ID NO: 3176 - RNA, 23 nt, synthetic construct
  source 1..23: mol_type = other RNA
  modified_base 9: mod_base = OTHER; note = 5'-methyluridine-3'-phosphate
  modified_base 20: mod_base = OTHER; note = 5'-methyluridine-3'-phosphate
cccagcactacagccaccgtgac

SEQ ID NO: 3177 - RNA, 23 nt, synthetic construct
  source 1..23: mol_type = other RNA
  modified_base 7: mod_base = OTHER; note = 5'-methyluridine-3'-phosphate
  modified_base 13: mod_base = OTHER; note = 5'-methyluridine-3'-phosphate
  modified_base 16: mod_base = OTHER; note = 5'-methyluridine-3'-phosphate
gcaccctcaaagtgctgaccagc

SEQ ID NO: 3178 - RNA, 23 nt, synthetic construct
  source 1..23: mol_type = other RNA
  modified_base 11: mod_base = OTHER; note = 5'-methyluridine-3'-phosphate
  modified_base 14: mod_base = OTHER; note = 5'-methyluridine-3'-phosphate
  modified_base 19: mod_base = OTHER; note = 5'-methyluridine-3'-phosphate
acacccacagtcatcagctccag

SEQ ID NO: 3179 - RNA, 23 nt, synthetic construct
  source 1..23: mol_type = other RNA
  modified_base 7: mod_base = OTHER; note = 5'-methyluridine-3'-phosphate
  modified_base 11: mod_base = OTHER; note = 5'-methyluridine-3'-phosphate
  modified_base 14: mod_base = OTHER; note = 5'-methyluridine-3'-phosphate
  modified_base 19: mod_base = OTHER; note = 5'-methyluridine-3'-phosphate
agccactccctcctccagtccag

SEQ ID NO: 3180 - RNA, 23 nt, synthetic construct
  source 1..23: mol_type = other RNA
  modified_base 4: mod_base = OTHER; note = 5'-methyluridine-3'-phosphate
  modified_base 12: mod_base = OTHER; note = 5'-methyluridine-3'-phosphate
  modified_base 13: mod_base = OTHER; note = 5'-methyluridine-3'-phosphate
  modified_base 21: mod_base = OTHER; note = 5'-methyluridine-3'-phosphate
agctaccagcgttacagccatcc

SEQ ID NO: 3181 - RNA, 23 nt, synthetic construct
  source 1..23: mol_type = other RNA
  modified_base 2: mod_base = OTHER; note = 5'-methyluridine-3'-phosphate
  modified_base 5: mod_base = OTHER; note = 5'-methyluridine-3'-phosphate
  modified_base 7: mod_base = OTHER; note = 5'-methyluridine-3'-phosphate
  modified_base 10: mod_base = OTHER; note = 5'-methyluridine-3'-phosphate
  modified_base 19: mod_base = OTHER; note = 5'-methyluridine-3'-phosphate
  modified_base 21: mod_base = OTHER; note = 5'-methyluridine-3'-phosphate
ctcctctactccagagactgtcc

SEQ ID NO: 3182 - RNA, 23 nt, synthetic construct
  source 1..23: mol_type = other RNA
  modified_base 2: mod_base = OTHER; note = 5'-methyluridine-3'-phosphate
  modified_base 9: mod_base = OTHER; note = 5'-methyluridine-3'-phosphate
  modified_base 12: mod_base = OTHER; note = 5'-methyluridine-3'-phosphate
  modified_base 13: mod_base = OTHER; note = 5'-methyluridine-3'-phosphate
ctccacagtgcttaccaccacga

SEQ ID NO: 3183 - RNA, 23 nt, synthetic construct
  source 1..23: mol_type = other RNA
  modified_base 6: mod_base = OTHER; note = 5'-methyluridine-3'-phosphate
  modified_base 12: mod_base = OTHER; note = 5'-methyluridine-3'-phosphate
  modified_base 20: mod_base = OTHER; note = 5'-methyluridine-3'-phosphate
acagctcacactaccaaagtgcc

SEQ ID NO: 3184 - RNA, 23 nt, synthetic construct
  source 1..23: mol_type = other RNA
  modified_base 4: mod_base = OTHER; note = 5'-methyluridine-3'-phosphate
  modified_base 20: mod_base = OTHER; note = 5'-methyluridine-3'-phosphate
  modified_base 21: mod_base = OTHER; note = 5'-methyluridine-3'-phosphate
gactaccacaaccacgggcttca

SEQ ID NO: 3185 - RNA, 23 nt, synthetic construct
  source 1..23: mol_type = other RNA
  modified_base 9: mod_base = OTHER; note = 5'-methyluridine-3'-phosphate
  modified_base 14: mod_base = OTHER; note = 5'-methyluridine-3'-phosphate
acggccactacgatcacagccac

SEQ ID NO: 3186 - RNA, 23 nt, synthetic construct
  source 1..23: mol_type = other RNA
  modified_base 19: mod_base = OTHER; note = 5'-methyluridine-3'-phosphate
cccagcagcaaccaccagtacca

SEQ ID NO: 3187 - RNA, 23 nt, synthetic construct
  source 1..23: mol_type = other RNA
  modified_base 5: mod_base = OTHER; note = 5'-methyluridine-3'-phosphate
cacctccaggaccacagccacag

SEQ ID NO: 3188 - RNA, 23 nt, synthetic construct
  source 1..23: mol_type = other RNA
  modified_base 1: mod_base = OTHER; note = 5'-methyluridine-3'-phosphate
  modified_base 10: mod_base = OTHER; note = 5'-methyluridine-3'-phosphate
  modified_base 13: mod_base = OTHER; note = 5'-methyluridine-3'-phosphate
taaccacggtggtgaccacgggc

SEQ ID NO: 3189 - RNA, 23 nt, synthetic construct
  source 1..23: mol_type = other RNA
  modified_base 1: mod_base = OTHER; note = 5'-methyluridine-3'-phosphate
  modified_base 14: mod_base = OTHER; note = 5'-methyluridine-3'-phosphate
  modified_base 17: mod_base = OTHER; note = 5'-methyluridine-3'-phosphate
  modified_base 22: mod_base = OTHER; note = 5'-methyluridine-3'-phosphate
tacggccacgccctcctcaactc

SEQ ID NO: 3190 - RNA, 23 nt, synthetic construct
  source 1..23: mol_type = other RNA
  modified_base 4: mod_base = OTHER; note = 5'-methyluridine-3'-phosphate
  modified_base 8: mod_base = OTHER; note = 5'-methyluridine-3'-phosphate
  modified_base 11: mod_base = OTHER; note = 5'-methyluridine-3'-phosphate
  modified_base 20: mod_base = OTHER; note = 5'-methyluridine-3'-phosphate
acctggatcctcacaaagctgac

SEQ ID NO: 3191 - RNA, 23 nt, synthetic construct
  source 1..23: mol_type = other RNA
  modified_base 15: mod_base = OTHER; note = 5'-methyluridine-3'-phosphate
  modified_base 19: mod_base = OTHER; note = 5'-methyluridine-3'-phosphate
acacccacaaccagtggctccac

SEQ ID NO: 3192 - RNA, 23 nt, synthetic construct
  source 1..23: mol_type = other RNA
  modified_base 10: mod_base = OTHER; note = 5'-methyluridine-3'-phosphate
  modified_base 14: mod_base = OTHER; note = 5'-methyluridine-3'-phosphate
  modified_base 17: mod_base = OTHER; note = 5'-methyluridine-3'-phosphate
gggacgacctggatcctcacaga

SEQ ID NO: 3193 - RNA, 23 nt, synthetic construct
  source 1..23: mol_type = other RNA
  modified_base 3: mod_base = OTHER; note = 5'-methyluridine-3'-phosphate
  modified_base 19: mod_base = OTHER; note = 5'-methyluridine-3'-phosphate
gctgaccacaacagccactacga

SEQ ID NO: 3194 - RNA, 23 nt, synthetic construct
  source 1..23: mol_type = other RNA
  modified_base 4: mod_base = OTHER; note = 5'-methyluridine-3'-phosphate
  modified_base 9: mod_base = OTHER; note = 5'-methyluridine-3'-phosphate
  modified_base 13: mod_base = OTHER; note = 5'-methyluridine-3'-phosphate
gcatccactggatccacggccac

SEQ ID NO: 3195 - RNA, 23 nt, synthetic construct
  source 1..23: mol_type = other RNA
  modified_base 4: mod_base = OTHER; note = 5'-methyluridine-3'-phosphate
  modified_base 12: mod_base = OTHER; note = 5'-methyluridine-3'-phosphate
  modified_base 15: mod_base = OTHER; note = 5'-methyluridine-3'-phosphate
ccctcccaaagtgctgaccagcc

SEQ ID NO: 3196 - RNA, 23 nt, synthetic construct
  source 1..23: mol_type = other RNA
  modified_base 11: mod_base = OTHER; note = 5'-methyluridine-3'-phosphate
  modified_base 19: mod_base = OTHER; note = 5'-methyluridine-3'-phosphate
agccaccaaatccacagctacca

SEQ ID NO: 3197 - RNA, 23 nt, synthetic construct
  source 1..23: mol_type = other RNA
  modified_base 12: mod_base = OTHER; note = 5'-methyluridine-3'-phosphate
  modified_base 13: mod_base = OTHER; note = 5'-methyluridine-3'-phosphate
  modified_base 19: mod_base = OTHER; note = 5'-methyluridine-3'-phosphate
agggccaccagttccacgtccac

SEQ ID NO: 3198 - RNA, 23 nt, synthetic construct
  source 1..23: mol_type = other RNA
  modified_base 1: mod_base = OTHER; note = 5'-methyluridine-3'-phosphate
  modified_base 3: mod_base = OTHER; note = 5'-methyluridine-3'-phosphate
tgtgagcaccacggccacgacac

SEQ ID NO: 3199 - RNA, 23 nt, synthetic construct
  source 1..23: mol_type = other RNA
  modified_base 2: mod_base = OTHER; note = 5'-methyluridine-3'-phosphate
  modified_base 11: mod_base = OTHER; note = 5'-methyluridine-3'-phosphate
  modified_base 17: mod_base = OTHER; note = 5'-methyluridine-3'-phosphate
  modified_base 22: mod_base = OTHER; note = 5'-methyluridine-3'-phosphate
  modified_base 23: mod_base = OTHER; note = 5'-methyluridine
gtccagggactgcaactgccctt

SEQ ID NO: 3200 - RNA, 23 nt, synthetic construct
  source 1..23: mol_type = other RNA
  modified_base 11: mod_base = OTHER; note = 5'-methyluridine-3'-phosphate
  modified_base 14: mod_base = OTHER; note = 5'-methyluridine-3'-phosphate
accgccagagtgctgaccaccac

SEQ ID NO: 3201 - RNA, 23 nt, synthetic construct
  source 1..23: mol_type = other RNA
  modified_base 1: mod_base = OTHER; note = 5'-methyluridine-3'-phosphate
  modified_base 18: mod_base = OTHER; note = 5'-methyluridine-3'-phosphate
tccagggacaacacccatcaccc

SEQ ID NO: 3202 - RNA, 23 nt, synthetic construct
  source 1..23: mol_type = other RNA
  modified_base 4: mod_base = OTHER; note = 5'-methyluridine-3'-phosphate
  modified_base 15: mod_base = OTHER; note = 5'-methyluridine-3'-phosphate
  modified_base 16: mod_base = OTHER; note = 5'-methyluridine-3'-phosphate
  modified_base 19: mod_base = OTHER; note = 5'-methyluridine-3'-phosphate
  modified_base 22: mod_base = OTHER; note = 5'-methyluridine-3'-phosphate
agctccaaagccacttcctcctc

SEQ ID NO: 3203 - RNA, 23 nt, synthetic construct
  source 1..23: mol_type = other RNA
  modified_base 3: mod_base = OTHER; note = 5'-methyluridine-3'-phosphate
  modified_base 6: mod_base = OTHER; note = 5'-methyluridine-3'-phosphate
agtgctgacaagcacagccacaa

SEQ ID NO: 3204 - RNA, 23 nt, synthetic construct
  source 1..23: mol_type = other RNA
  modified_base 1: mod_base = OTHER; note = 5'-methyluridine-3'-phosphate
  modified_base 4: mod_base = OTHER; note = 5'-methyluridine-3'-phosphate
  modified_base 11: mod_base = OTHER; note = 5'-methyluridine-3'-phosphate
  modified_base 13: mod_base = OTHER; note = 5'-methyluridine-3'-phosphate
  modified_base 22: mod_base = OTHER; note = 5'-methyluridine-3'-phosphate
tcctccaccctgtggaccacgtg

SEQ ID NO: 3205 - RNA, 23 nt, synthetic construct
  source 1..23: mol_type = other RNA
  modified_base 2: mod_base = OTHER; note = 5'-methyluridine-3'-phosphate
gtcccagcacagaccaccacacc

SEQ ID NO: 3206 - RNA, 23 nt, synthetic construct
  source 1..23: mol_type = other RNA
  modified_base 2: mod_base = OTHER; note = 5'-methyluridine-3'-phosphate
  modified_base 4: mod_base = OTHER; note = 5'-methyluridine-3'-phosphate
  modified_base 11: mod_base = OTHER; note = 5'-methyluridine-3'-phosphate
  modified_base 13: mod_base = OTHER; note = 5'-methyluridine-3'-phosphate
  modified_base 20: mod_base = OTHER; note = 5'-methyluridine-3'-phosphate
atgtccaccatgtccacaatcca

SEQ ID NO: 3207 - RNA, 23 nt, synthetic construct
  source 1..23: mol_type = other RNA
  modified_base 4: mod_base = OTHER; note = 5'-methyluridine-3'-phosphate
  modified_base 7: mod_base = OTHER; note = 5'-methyluridine-3'-phosphate
  modified_base 9: mod_base = OTHER; note = 5'-methyluridine-3'-phosphate
  modified_base 12: mod_base = OTHER; note = 5'-methyluridine-3'-phosphate
acctcctctactccagagaccac

SEQ ID NO: 3208 - RNA, 23 nt, synthetic construct
  source 1..23: mol_type = other RNA
  modified_base 4: mod_base = OTHER; note = 5'-methyluridine-3'-phosphate
  modified_base 11: mod_base = OTHER; note = 5'-methyluridine-3'-phosphate
  modified_base 14: mod_base = OTHER; note = 5'-methyluridine-3'-phosphate
acctccacagtgctgaccaccac

SEQ ID NO: 3209 - RNA, 23 nt, synthetic construct
  source 1..23: mol_type = other RNA
  modified_base 12: mod_base = OTHER; note = 5'-methyluridine-3'-phosphate
  modified_base 13: mod_base = OTHER; note = 5'-methyluridine-3'-phosphate
agggccaccaattccacggccac

SEQ ID NO: 3210 - RNA, 23 nt, synthetic construct
  source 1..23: mol_type = other RNA
  modified_base 3: mod_base = OTHER; note = 5'-methyluridine-3'-phosphate
  modified_base 19: mod_base = OTHER; note = 5'-methyluridine-3'-phosphate
gctgaccacaacagccactacaa

SEQ ID NO: 3211 - RNA, 23 nt, synthetic construct
  source 1..23: mol_type = other RNA
  modified_base 3: mod_base = OTHER; note = 5'-methyluridine-3'-phosphate
  modified_base 7: mod_base = OTHER; note = 5'-methyluridine-3'-phosphate
  modified_base 20: mod_base = OTHER; note = 5'-methyluridine-3'-phosphate
  modified_base 22: mod_base = OTHER; note = 5'-methyluridine-3'-phosphate
actggatccacggccaccctgtc

SEQ ID NO: 3212 - RNA, 23 nt, synthetic construct
  source 1..23: mol_type = other RNA
  modified_base 9: mod_base = OTHER; note = 5'-methyluridine-3'-phosphate
  modified_base 11: mod_base = OTHER; note = 5'-methyluridine-3'-phosphate
  modified_base 20: mod_base = OTHER; note = 5'-methyluridine-3'-phosphate
  modified_base 23: mod_base = OTHER; note = 5'-methyluridine
ccgagcactatagccaccgtgat

SEQ ID NO: 3213 - RNA, 23 nt, synthetic construct
  source 1..23: mol_type = other RNA
  modified_base 2: mod_base = OTHER; note = 5'-methyluridine-3'-phosphate
  modified_base 7: mod_base = OTHER; note = 5'-methyluridine-3'-phosphate
  modified_base 9: mod_base = OTHER; note = 5'-methyluridine-3'-phosphate
  modified_base 19: mod_base = OTHER; note = 5'-methyluridine-3'-phosphate
ctccactctgggaacagctcaca

SEQ ID NO: 3214 - RNA, 23 nt, synthetic construct
  source 1..23: mol_type = other RNA
  modified_base 5: mod_base = OTHER; note = 5'-methyluridine-3'-phosphate
  modified_base 12: mod_base = OTHER; note = 5'-methyluridine-3'-phosphate
  modified_base 14: mod_base = OTHER; note = 5'-methyluridine-3'-phosphate
accatggccactatgcccacagc

SEQ ID NO: 3215 - RNA, 23 nt, synthetic construct
  source 1..23: mol_type = other RNA
  modified_base 3: mod_base = OTHER; note = 5'-methyluridine-3'-phosphate
  modified_base 7: mod_base = OTHER; note = 5'-methyluridine-3'-phosphate
  modified_base 14: mod_base = OTHER; note = 5'-methyluridine-3'-phosphate
  modified_base 15: mod_base = OTHER; note = 5'-methyluridine-3'-phosphate
  modified_base 22: mod_base = OTHER; note = 5'-methyluridine-3'-phosphate
actgcctccacggttcccagctc

SEQ ID NO: 3216 - RNA, 23 nt, synthetic construct
  source 1..23: mol_type = other RNA
  modified_base 2: mod_base = OTHER; note = 5'-methyluridine-3'-phosphate
  modified_base 10: mod_base = OTHER; note = 5'-methyluridine-3'-phosphate
  modified_base 11: mod_base = OTHER; note = 5'-methyluridine-3'-phosphate
  modified_base 17: mod_base = OTHER; note = 5'-methyluridine-3'-phosphate
  modified_base 19: mod_base = OTHER; note = 5'-methyluridine-3'-phosphate
ctgccaaccttcagcgtgtccac

SEQ ID NO: 3217 - RNA, 23 nt, synthetic construct
  source 1..23: mol_type = other RNA
  modified_base 1: mod_base = OTHER; note = 5'-methyluridine-3'-phosphate
  modified_base 3: mod_base = OTHER; note = 5'-methyluridine-3'-phosphate
  modified_base 6: mod_base = OTHER; note = 5'-methyluridine-3'-phosphate
  modified_base 9: mod_base = OTHER; note = 5'-methyluridine-3'-phosphate
  modified_base 13: mod_base = OTHER; note = 5'-methyluridine-3'-phosphate
  modified_base 16: mod_base = OTHER; note = 5'-methyluridine-3'-phosphate
tgtcctcctcagtcctcaccacc

SEQ ID NO: 3218 - RNA, 23 nt, synthetic construct
  source 1..23: mol_type = other RNA
  modified_base 3: mod_base = OTHER; note = 5'-methyluridine-3'-phosphate
  modified_base 9: mod_base = OTHER; note = 5'-methyluridine-3'-phosphate
  modified_base 10: mod_base = OTHER; note = 5'-methyluridine-3'-phosphate
  modified_base 12: mod_base = OTHER; note = 5'-methyluridine-3'-phosphate
  modified_base 14: mod_base = OTHER; note = 5'-methyluridine-3'-phosphate
  modified_base 17: mod_base = OTHER; note = 5'-methyluridine-3'-phosphate
  modified_base 21: mod_base = OTHER; note = 5'-methyluridine-3'-phosphate
gctcccacttctctactccctgc

SEQ ID NO: 3219 - RNA, 23 nt, synthetic construct
  source 1..23: mol_type = other RNA
  modified_base 6: mod_base = OTHER; note = 5'-methyluridine-3'-phosphate
  modified_base 7: mod_base = OTHER; note = 5'-methyluridine-3'-phosphate
  modified_base 8: mod_base = OTHER; note = 5'-methyluridine-3'-phosphate
  modified_base 15: mod_base = OTHER; note = 5'-methyluridine-3'-phosphate
  modified_base 16: mod_base = OTHER; note = 5'-methyluridine-3'-phosphate
  modified_base 17: mod_base = OTHER; note = 5'-methyluridine-3'-phosphate
  modified_base 18: mod_base = OTHER; note = 5'-methyluridine-3'-phosphate
  modified_base 19: mod_base = OTHER; note = 5'-methyluridine-3'-phosphate
  modified_base 21: mod_base = OTHER; note = 5'-methyluridine-3'-phosphate
gggcatttggacagtttttctcg

SEQ ID NO: 3220 - RNA, 23 nt, synthetic construct
  source 1..23: mol_type = other RNA
  modified_base 7: mod_base = OTHER; note = 5'-methyluridine-3'-phosphate
  modified_base 10: mod_base = OTHER; note = 5'-methyluridine-3'-phosphate
  modified_base 12: mod_base = OTHER; note = 5'-methyluridine-3'-phosphate
  modified_base 17: mod_base = OTHER; note = 5'-methyluridine-3'-phosphate
gggaagtcatctacaataagacc

SEQ ID NO: 3221 - RNA, 23 nt, synthetic construct
  source 1..23: mol_type = other RNA
  modified_base 4: mod_base = OTHER; note = 5'-methyluridine-3'-phosphate
  modified_base 9: mod_base = OTHER; note = 5'-methyluridine-3'-phosphate
  modified_base 10: mod_base = OTHER; note = 5'-methyluridine-3'-phosphate
  modified_base 11: mod_base = OTHER; note = 5'-methyluridine-3'-phosphate
  modified_base 13: mod_base = OTHER; note = 5'-methyluridine-3'-phosphate
  modified_base 20: mod_base = OTHER; note = 5'-methyluridine-3'-phosphate
  modified_base 22: mod_base = OTHER; note = 5'-methyluridine-3'-phosphate
ggctgccatttctacgcagtgtg

SEQ ID NO: 3222 - RNA, 23 nt, synthetic construct
  source 1..23: mol_type = other RNA
  modified_base 6: mod_base = OTHER; note = 5'-methyluridine-3'-phosphate
  modified_base 8: mod_base = OTHER; note = 5'-methyluridine-3'-phosphate
  modified_base 13: mod_base = OTHER; note = 5'-methyluridine-3'-phosphate
  modified_base 14: mod_base = OTHER; note = 5'-methyluridine-3'-phosphate
  modified_base 21: mod_base = OTHER; note = 5'-methyluridine-3'-phosphate
  modified_base 22: mod_base = OTHER; note = 5'-methyluridine-3'-phosphate
agcactgtgacattgaccgcttc

SEQ ID NO: 3223 - RNA, 23 nt, synthetic construct
  source 1..23: mol_type = other RNA
  modified_base 3: mod_base = OTHER; note = 5'-methyluridine-3'-phosphate
  modified_base 5: mod_base = OTHER; note = 5'-methyluridine-3'-phosphate
  modified_base 11: mod_base = OTHER; note = 5'-methyluridine-3'-phosphate
  modified_base 16: mod_base = OTHER; note = 5'-methyluridine-3'-phosphate
  modified_base 20: mod_base = OTHER; note = 5'-methyluridine-3'-phosphate
  modified_base 22: mod_base = OTHER; note = 5'-methyluridine-3'-phosphate
gctgtgacaatgccatccctctc

SEQ ID NO: 3224 - RNA, 23 nt, synthetic construct
  source 1..23: mol_type = other RNA
  modified_base 7: mod_base = OTHER; note = 5'-methyluridine-3'-phosphate
  modified_base 15: mod_base = OTHER; note = 5'-methyluridine-3'-phosphate
  modified_base 22: mod_base = OTHER; note = 5'-methyluridine-3'-phosphate
ggaccctggagaactgcacggtg

SEQ ID NO: 3225 - RNA, 23 nt, synthetic construct
  source 1..23: mol_type = other RNA
  modified_base 4: mod_base = OTHER; note = 5'-methyluridine-3'-phosphate
  modified_base 8: mod_base = OTHER; note = 5'-methyluridine-3'-phosphate
  modified_base 17: mod_base = OTHER; note = 5'-methyluridine-3'-phosphate
  modified_base 19: mod_base = OTHER; note = 5'-methyluridine-3'-phosphate
  modified_base 22: mod_base = OTHER; note = 5'-methyluridine-3'-phosphate
gcgtgggtgacaaccgtgtcgtc

SEQ ID NO: 3226 - RNA, 23 nt, synthetic construct
  source 1..23: mol_type = other RNA
  modified_base 1: mod_base = OTHER; note = 5'-methyluridine-3'-phosphate
  modified_base 14: mod_base = OTHER; note = 5'-methyluridine-3'-phosphate
  modified_base 16: mod_base = OTHER; note = 5'-methyluridine-3'-phosphate
tggacccaaagcctgtggccaac

SEQ ID NO: 3227 - RNA, 23 nt, synthetic construct
  source 1..23: mol_type = other RNA
  modified_base 4: mod_base = OTHER; note = 5'-methyluridine-3'-phosphate
  modified_base 8: mod_base = OTHER; note = 5'-methyluridine-3'-phosphate
  modified_base 20: mod_base = OTHER; note = 5'-methyluridine-3'-phosphate
acctgcgtgaacaagcacctgcc

SEQ ID NO: 3228 - RNA, 23 nt, synthetic construct
  source 1..23: mol_type = other RNA
  modified_base 3: mod_base = OTHER; note = 5'-methyluridine-3'-phosphate
  modified_base 9: mod_base = OTHER; note = 5'-methyluridine-3'-phosphate
  modified_base 11: mod_base = OTHER; note = 5'-methyluridine-3'-phosphate
catcaaagtgtcggacccgagcc

SEQ ID NO: 3229 - RNA, 23 nt, synthetic construct
  source 1..23: mol_type = other RNA
  modified_base 5: mod_base = OTHER; note = 5'-methyluridine-3'-phosphate
  modified_base 7: mod_base = OTHER; note = 5'-methyluridine-3'-phosphate
  modified_base 11: mod_base = OTHER; note = 5'-methyluridine-3'-phosphate
  modified_base 12: mod_base = OTHER; note = 5'-methyluridine-3'-phosphate
  modified_base 17: mod_base = OTHER; note = 5'-methyluridine-3'-phosphate
  modified_base 19: mod_base = OTHER; note = 5'-methyluridine-3'-phosphate
  modified_base 23: mod_base = OTHER; note = 5'-methyluridine
gccctgtgacttccactatgagt

SEQ ID NO: 3230 - RNA, 23 nt, synthetic construct
  source 1..23: mol_type = other RNA
  modified_base 6: mod_base = OTHER; note = 5'-methyluridine-3'-phosphate
  modified_base 10: mod_base = OTHER; note = 5'-methyluridine-3'-phosphate
  modified_base 12: mod_base = OTHER; note = 5'-methyluridine-3'-phosphate
  modified_base 19: mod_base = OTHER; note = 5'-methyluridine-3'-phosphate
  modified_base 21: mod_base = OTHER; note = 5'-methyluridine-3'-phosphate
gcgagtgcatctgcagcatgtgg

SEQ ID NO: 3231 - RNA, 23 nt, synthetic construct
  source 1..23: mol_type = other RNA
  modified_base 2: mod_base = OTHER; note = 5'-methyluridine-3'-phosphate
  modified_base 8: mod_base = OTHER; note = 5'-methyluridine-3'-phosphate
  modified_base 10: mod_base = OTHER; note = 5'-methyluridine-3'-phosphate
  modified_base 11: mod_base = OTHER; note = 5'-methyluridine-3'-phosphate
  modified_base 17: mod_base = OTHER; note = 5'-methyluridine-3'-phosphate
  modified_base 18: mod_base = OTHER; note = 5'-methyluridine-3'-phosphate
  modified_base 19: mod_base = OTHER; note = 5'-methyluridine-3'-phosphate
ctcccactattccacctttgacg

SEQ ID NO: 3232 - RNA, 23 nt, synthetic construct
  source 1..23: mol_type = other RNA
  modified_base 6: mod_base = OTHER; note = 5'-methyluridine-3'-phosphate
  modified_base 8: mod_base = OTHER; note = 5'-methyluridine-3'-phosphate
  modified_base 10: mod_base = OTHER; note = 5'-methyluridine-3'-phosphate
  modified_base 13: mod_base = OTHER; note = 5'-methyluridine-3'-phosphate
  modified_base 16: mod_base = OTHER; note = 5'-methyluridine-3'-phosphate
gcacctatgtcctcatgagagag

SEQ ID NO: 3233 - RNA, 23 nt, synthetic construct
  source 1..23: mol_type = other RNA
  modified_base 1: mod_base = OTHER; note = 5'-methyluridine-3'-phosphate
  modified_base 8: mod_base = OTHER; note = 5'-methyluridine-3'-phosphate
  modified_base 9: mod_base = OTHER; note = 5'-methyluridine-3'-phosphate
  modified_base 10: mod_base = OTHER; note = 5'-methyluridine-3'-phosphate
  modified_base 16: mod_base = OTHER; note = 5'-methyluridine-3'-phosphate
  modified_base 18: mod_base = OTHER; note = 5'-methyluridine-3'-phosphate
tgcacgctttgggaatctcagcc

SEQ ID NO: 3234 - RNA, 23 nt, synthetic construct
  source 1..23: mol_type = other RNA
  modified_base 4: mod_base = OTHER; note = 5'-methyluridine-3'-phosphate
  modified_base 15: mod_base = OTHER; note = 5'-methyluridine-3'-phosphate
  modified_base 18: mod_base = OTHER; note = 5'-methyluridine-3'-phosphate
acctggacaaccactactgcacg

SEQ ID NO: 3235 - RNA, 23 nt, synthetic construct
  source 1..23: mol_type = other RNA
  modified_base 4: mod_base = OTHER; note = 5'-methyluridine-3'-phosphate
  modified_base 10: mod_base = OTHER; note = 5'-methyluridine-3'-phosphate
  modified_base 15: mod_base = OTHER; note = 5'-methyluridine-3'-phosphate
  modified_base 21: mod_base = OTHER; note = 5'-methyluridine-3'-phosphate
ccctcagcatccactacaagtcc

SEQ ID NO: 3236 - RNA, 23 nt, synthetic construct
  source 1..23: mol_type = other RNA
  modified_base 1: mod_base = OTHER; note = 5'-methyluridine-3'-phosphate
  modified_base 4: mod_base = OTHER; note = 5'-methyluridine-3'-phosphate
  modified_base 7: mod_base = OTHER; note = 5'-methyluridine-3'-phosphate
  modified_base 11: mod_base = OTHER; note = 5'-methyluridine-3'-phosphate
  modified_base 13: mod_base = OTHER; note = 5'-methyluridine-3'-phosphate
  modified_base 19: mod_base = OTHER; note = 5'-methyluridine-3'-phosphate
  modified_base 22: mod_base = OTHER; note = 5'-methyluridine-3'-phosphate
tcgtcctcactgtcaccatggtg

SEQ ID NO: 3237 - RNA, 23 nt, synthetic construct
  source 1..23: mol_type = other RNA
  modified_base 5: mod_base = OTHER; note = 5'-methyluridine-3'-phosphate
  modified_base 8: mod_base = OTHER; note = 5'-methyluridine-3'-phosphate
  modified_base 11: mod_base = OTHER; note = 5'-methyluridine-3'-phosphate
  modified_base 13: mod_base = OTHER; note = 5'-methyluridine-3'-phosphate
  modified_base 14: mod_base = OTHER; note = 5'-methyluridine-3'-phosphate
  modified_base 15: mod_base = OTHER; note = 5'-methyluridine-3'-phosphate
  modified_base 23: mod_base = OTHER; note = 5'-methyluridine
ggcctgatcctgtttgaccaaat

SEQ ID NO: 3238 - RNA, 23 nt, synthetic construct
  source 1..23: mol_type = other RNA
  modified_base 8: mod_base = OTHER; note = 5'-methyluridine-3'-phosphate
  modified_base 9: mod_base = OTHER; note = 5'-methyluridine-3'-phosphate
  modified_base 10: mod_base = OTHER; note = 5'-methyluridine-3'-phosphate
gcagcggtttcagcaagaacggc

SEQ ID NO: 3239 - RNA, 23 nt, synthetic construct
  source 1..23: mol_type = other RNA
  modified_base 1: mod_base = OTHER; note = 5'-methyluridine-3'-phosphate
  modified_base 5: mod_base = OTHER; note = 5'-methyluridine-3'-phosphate
  modified_base 7: mod_base = OTHER; note = 5'-methyluridine-3'-phosphate
  modified_base 13: mod_base = OTHER; note = 5'-methyluridine-3'-phosphate
  modified_base 14: mod_base = OTHER; note = 5'-methyluridine-3'-phosphate
  modified_base 17: mod_base = OTHER; note = 5'-methyluridine-3'-phosphate
  modified_base 22: mod_base = OTHER; note = 5'-methyluridine-3'-phosphate
tgcgtgtggacattcctgccctg

SEQ ID NO: 3240 - RNA, 23 nt, synthetic construct
  source 1..23: mol_type = other RNA
  modified_base 4: mod_base = OTHER; note = 5'-methyluridine-3'-phosphate
  modified_base 10: mod_base = OTHER; note = 5'-methyluridine-3'-phosphate
  modified_base 15: mod_base = OTHER; note = 5'-methyluridine-3'-phosphate
  modified_base 16: mod_base = OTHER; note = 5'-methyluridine-3'-phosphate
  modified_base 20: mod_base = OTHER; note = 5'-methyluridine-3'-phosphate
gcgtgagcgtcaccttcaatggc

SEQ ID NO: 3241 - RNA, 23 nt, synthetic construct
  source 1..23: mol_type = other RNA
  modified_base 7: mod_base = OTHER; note = 5'-methyluridine-3'-phosphate
  modified_base 9: mod_base = OTHER; note = 5'-methyluridine-3'-phosphate
  modified_base 10: mod_base = OTHER; note = 5'-methyluridine-3'-phosphate
acagcctcttccacaacaacacc

SEQ ID NO: 3242 - RNA, 23 nt, synthetic construct
  source 1..23: mol_type = other RNA
  modified_base 3: mod_base = OTHER; note = 5'-methyluridine-3'-phosphate
cctgcaccaacaaccagagggac

SEQ ID NO: 3243 - RNA, 23 nt, synthetic construct
  source 1..23: mol_type = other RNA
  modified_base 3: mod_base = OTHER; note = 5'-methyluridine-3'-phosphate
  modified_base 5: mod_base = OTHER; note = 5'-methyluridine-3'-phosphate
  modified_base 7: mod_base = OTHER; note = 5'-methyluridine-3'-phosphate
actgtctccagcgggacggaacc

SEQ ID NO: 3244 - RNA, 23 nt, synthetic construct
  source 1..23: mol_type = other RNA
  modified_base 9: mod_base = OTHER; note = 5'-methyluridine-3'-phosphate
  modified_base 10: mod_base = OTHER; note = 5'-methyluridine-3'-phosphate
  modified_base 20: mod_base = OTHER; note = 5'-methyluridine-3'-phosphate
gccgccagttgcaaggacatggc

SEQ ID NO: 3245 - RNA, 23 nt, synthetic construct
  source 1..23: mol_type = other RNA
  modified_base 18: mod_base = OTHER; note = 5'-methyluridine-3'-phosphate
  modified_base 22: mod_base = OTHER; note = 5'-methyluridine-3'-phosphate
cccgacagcagaaaggatggctg

SEQ ID NO: 3246 - RNA, 23 nt, synthetic construct
  source 1..23: mol_type = other RNA
  modified_base 7: mod_base = OTHER; note = 5'-methyluridine-3'-phosphate
  modified_base 9: mod_base = OTHER; note = 5'-methyluridine-3'-phosphate
  modified_base 11: mod_base = OTHER; note = 5'-methyluridine-3'-phosphate
  modified_base 14: mod_base = OTHER; note = 5'-methyluridine-3'-phosphate
  modified_base 16: mod_base = OTHER; note = 5'-methyluridine-3'-phosphate
  modified_base 19: mod_base = OTHER; note = 5'-methyluridine-3'-phosphate
  modified_base 22: mod_base = OTHER; note = 5'-methyluridine-3'-phosphate
agccgctctgtgatctgatgctg

SEQ ID NO: 3247 - RNA, 23 nt, synthetic construct
  source 1..23: mol_type = other RNA
  modified_base 7: mod_base = OTHER; note = 5'-methyluridine-3'-phosphate
  modified_base 9: mod_base = OTHER; note = 5'-methyluridine-3'-phosphate
  modified_base 10: mod_base = OTHER; note = 5'-methyluridine-3'-phosphate
  modified_base 11: mod_base = OTHER; note = 5'-methyluridine-3'-phosphate
  modified_base 14: mod_base = OTHER; note = 5'-methyluridine-3'-phosphate
  modified_base 18: mod_base = OTHER; note = 5'-methyluridine-3'-phosphate
gccaggtctttgctgagtgccac

SEQ ID NO: 3248 - RNA, 23 nt, synthetic construct
  source 1..23: mol_type = other RNA
  modified_base 10: mod_base = OTHER; note = 5'-methyluridine-3'-phosphate
  modified_base 11: mod_base = OTHER; note = 5'-methyluridine-3'-phosphate
  modified_base 13: mod_base = OTHER; note = 5'-methyluridine-3'-phosphate
  modified_base 14: mod_base = OTHER; note = 5'-methyluridine-3'-phosphate
  modified_base 22: mod_base = OTHER; note = 5'-methyluridine-3'-phosphate
ccgggcccattcttcaacgcctg

SEQ ID NO: 3249 - RNA, 23 nt, synthetic construct
  source 1..23: mol_type = other RNA
  modified_base 1: mod_base = OTHER; note = 5'-methyluridine-3'-phosphate
  modified_base 8: mod_base = OTHER; note = 5'-methyluridine-3'-phosphate
  modified_base 9: mod_base = OTHER; note = 5'-methyluridine-3'-phosphate
  modified_base 19: mod_base = OTHER; note = 5'-methyluridine-3'-phosphate
  modified_base 21: mod_base = OTHER; note = 5'-methyluridine-3'-phosphate
tggaggcttacgcagagctctgc

SEQ ID NO: 3250 - RNA, 23 nt, synthetic construct
  source 1..23: mol_type = other RNA
  modified_base 5: mod_base = OTHER; note = 5'-methyluridine-3'-phosphate
  modified_base 7: mod_base = OTHER; note = 5'-methyluridine-3'-phosphate
  modified_base 12: mod_base = OTHER; note = 5'-methyluridine-3'-phosphate
  modified_base 16: mod_base = OTHER; note = 5'-methyluridine-3'-phosphate
ggagtgtgcagtgactggcgagg

SEQ ID NO: 3251 - RNA, 23 nt, synthetic construct
  source 1..23: mol_type = other RNA
  modified_base 12: mod_base = OTHER; note = 5'-methyluridine-3'-phosphate
  modified_base 14: mod_base = OTHER; note = 5'-methyluridine-3'-phosphate
  modified_base 23: mod_base = OTHER; note = 5'-methyluridine
acccaccaaagtgtacaagccat

SEQ ID NO: 3252 - RNA, 23 nt, synthetic construct
  source 1..23: mol_type = other RNA
  modified_base 4: mod_base = OTHER; note = 5'-methyluridine-3'-phosphate
  modified_base 10: mod_base = OTHER; note = 5'-methyluridine-3'-phosphate
  modified_base 12: mod_base = OTHER; note = 5'-methyluridine-3'-phosphate
acctgcaactctaggaaccagag

SEQ ID NO: 3253 - RNA, 23 nt, synthetic construct
  source 1..23: mol_type = other RNA
  modified_base 7: mod_base = OTHER; note = 5'-methyluridine-3'-phosphate
  modified_base 10: mod_base = OTHER; note = 5'-methyluridine-3'-phosphate
  modified_base 12: mod_base = OTHER; note = 5'-methyluridine-3'-phosphate
  modified_base 13: mod_base = OTHER; note = 5'-methyluridine-3'-phosphate
accagatcctcttcaacgcacac

SEQ ID NO: 3254 - RNA, 23 nt, synthetic construct
  source 1..23: mol_type = other RNA
  modified_base 2: mod_base = OTHER; note = 5'-methyluridine-3'-phosphate
  modified_base 8: mod_base = OTHER; note = 5'-methyluridine-3'-phosphate
  modified_base 10: mod_base = OTHER; note = 5'-methyluridine-3'-phosphate
  modified_base 14: mod_base = OTHER; note = 5'-methyluridine-3'-phosphate
  modified_base 22: mod_base = OTHER; note = 5'-methyluridine-3'-phosphate
atgggcatctgcgtgcaggcctg

SEQ ID NO: 3255 - RNA, 23 nt, synthetic construct
  source 1..23: mol_type = other RNA
  modified_base 6: mod_base = OTHER; note = 5'-methyluridine-3'-phosphate
  modified_base 10: mod_base = OTHER; note = 5'-methyluridine-3'-phosphate
  modified_base 11: mod_base = OTHER; note = 5'-methyluridine-3'-phosphate
  modified_base 12: mod_base = OTHER; note = 5'-methyluridine-3'-phosphate
  modified_base 15: mod_base = OTHER; note = 5'-methyluridine-3'-phosphate
  modified_base 19: mod_base = OTHER; note = 5'-methyluridine-3'-phosphate
  modified_base 20: mod_base = OTHER; note = 5'-methyluridine-3'-phosphate
  modified_base 21: mod_base = OTHER; note = 5'-methyluridine-3'-phosphate
cccgatgggtttcctaaatttcc

SEQ ID NO: 3256 - RNA, 23 nt, synthetic construct
  source 1..23: mol_type = other RNA
  modified_base 1: mod_base = OTHER; note = 5'-methyluridine-3'-phosphate
  modified_base 5: mod_base = OTHER; note = 5'-methyluridine-3'-phosphate
  modified_base 13: mod_base = OTHER; note = 5'-methyluridine-3'-phosphate
  modified_base 19: mod_base = OTHER; note = 5'-methyluridine-3'-phosphate
  modified_base 22: mod_base = OTHER; note = 5'-methyluridine-3'-phosphate
tgggtcagcaactgccagtcctg

SEQ ID NO: 3257 - RNA, 23 nt, synthetic construct
  source 1..23: mol_type = other RNA
  modified_base 8: mod_base = OTHER; note = 5'-methyluridine-3'-phosphate
  modified_base 9: mod_base = OTHER; note = 5'-methyluridine-3'-phosphate
  modified_base 13: mod_base = OTHER; note = 5'-methyluridine-3'-phosphate
  modified_base 15: mod_base = OTHER; note = 5'-methyluridine-3'-phosphate
  modified_base 19: mod_base = OTHER; note = 5'-methyluridine-3'-phosphate
acgagggttcagtgtcggtgcag

SEQ ID NO: 3258 - RNA, 23 nt, synthetic construct
  source 1..23: mol_type = other RNA
  modified_base 7: mod_base = OTHER; note = 5'-methyluridine-3'-phosphate
  modified_base 8: mod_base = OTHER; note = 5'-methyluridine-3'-phosphate
  modified_base 11: mod_base = OTHER; note = 5'-methyluridine-3'-phosphate
  modified_base 17: mod_base = OTHER; note = 5'-methyluridine-3'-phosphate
cccggcttcgtaaccgtgaccag

SEQ ID NO: 3259 - RNA, 23 nt, synthetic construct
  source 1..23: mol_type = other RNA
  modified_base 1: mod_base = OTHER; note = 5'-methyluridine-3'-phosphate
  modified_base 5: mod_base = OTHER; note = 5'-methyluridine-3'-phosphate
  modified_base 7: mod_base = OTHER; note = 5'-methyluridine-3'-phosphate
  modified_base 22: mod_base = OTHER; note = 5'-methyluridine-3'-phosphate
tgcgtgtgcaacacaaccacctg

SEQ ID NO: 3260 - RNA, 23 nt, synthetic construct
  source 1..23: mol_type = other RNA
  modified_base 9: mod_base = OTHER; note = 5'-methyluridine-3'-phosphate
  modified_base 13: mod_base = OTHER; note = 5'-methyluridine-3'-phosphate
  modified_base 15: mod_base = OTHER; note = 5'-methyluridine-3'-phosphate
ggcaggagtccatctgcacccag

SEQ ID NO: 3261 - RNA, 23 nt, synthetic construct
  source 1..23: mol_type = other RNA
  modified_base 1: mod_base = OTHER; note = 5'-methyluridine-3'-phosphate
  modified_base 4: mod_base = OTHER; note = 5'-methyluridine-3'-phosphate
  modified_base 6: mod_base = OTHER; note = 5'-methyluridine-3'-phosphate
  modified_base 13: mod_base = OTHER; note = 5'-methyluridine-3'-phosphate
  modified_base 14: mod_base = OTHER; note = 5'-methyluridine-3'-phosphate
  modified_base 19: mod_base = OTHER; note = 5'-methyluridine-3'-phosphate
tgctgtcccaccttccgctgcag

SEQ ID NO: 3262 - RNA, 23 nt, synthetic construct
  source 1..23: mol_type = other RNA
  modified_base 3: mod_base = OTHER; note = 5'-methyluridine-3'-phosphate
  modified_base 8: mod_base = OTHER; note = 5'-methyluridine-3'-phosphate
  modified_base 10: mod_base = OTHER; note = 5'-methyluridine-3'-phosphate
  modified_base 12: mod_base = OTHER; note = 5'-methyluridine-3'-phosphate
  modified_base 13: mod_base = OTHER; note = 5'-methyluridine-3'-phosphate
  modified_base 16: mod_base = OTHER; note = 5'-methyluridine-3'-phosphate
  modified_base 21: mod_base = OTHER; note = 5'-methyluridine-3'-phosphate
cctcagctgtgttcgtacaatgg

SEQ ID NO: 3263 - RNA, 23 nt, synthetic construct
  source 1..23: mol_type = other RNA
  modified_base 3: mod_base = OTHER; note = 5'-methyluridine-3'-phosphate
  modified_base 4: mod_base = OTHER; note = 5'-methyluridine-3'-phosphate
  modified_base 7: mod_base = OTHER; note = 5'-methyluridine-3'-phosphate
  modified_base 14: mod_base = OTHER; note = 5'-methyluridine-3'-phosphate
  modified_base 15: mod_base = OTHER; note = 5'-methyluridine-3'-phosphate
ggttggtgcaaccttcccaggcg

SEQ ID NO: 3264 - RNA, 23 nt, synthetic construct
  source 1..23: mol_type = other RNA
  modified_base 2: mod_base = OTHER; note = 5'-methyluridine-3'-phosphate
  modified_base 3: mod_base = OTHER; note = 5'-methyluridine-3'-phosphate
  modified_base 7: mod_base = OTHER; note = 5'-methyluridine-3'-phosphate
  modified_base 14: mod_base = OTHER; note = 5'-methyluridine-3'-phosphate
  modified_base 16: mod_base = OTHER; note = 5'-methyluridine-3'-phosphate
  modified_base 18: mod_base = OTHER; note = 5'-methyluridine-3'-phosphate
  modified_base 22: mod_base = OTHER; note = 5'-methyluridine-3'-phosphate
cttccctgccacatgtgtacctg

SEQ ID NO: 3265 - RNA, 23 nt, synthetic construct
  source 1..23: mol_type = other RNA
  modified_base 7: mod_base = OTHER; note = 5'-methyluridine-3'-phosphate
  modified_base 12: mod_base = OTHER; note = 5'-methyluridine-3'-phosphate
  modified_base 14: mod_base = OTHER; note = 5'-methyluridine-3'-phosphate
  modified_base 23: mod_base = OTHER; note = 5'-methyluridine
caacggtgcaatgtcaggaggat

SEQ ID NO: 3266 - RNA, 23 nt, synthetic construct
  source 1..23: mol_type = other RNA
  modified_base 4: mod_base = OTHER; note = 5'-methyluridine-3'-phosphate
  modified_base 12: mod_base = OTHER; note = 5'-methyluridine-3'-phosphate
  modified_base 15: mod_base = OTHER; note = 5'-methyluridine-3'-phosphate
  modified_base 19: mod_base = OTHER; note = 5'-methyluridine-3'-phosphate
  modified_base 21: mod_base = OTHER; note = 5'-methyluridine-3'-phosphate
gcctgcaacaatactacctgtcc

SEQ ID NO: 3267 - RNA, 23 nt, synthetic construct
  source 1..23: mol_type = other RNA
  modified_base 7: mod_base = OTHER; note = 5'-methyluridine-3'-phosphate
  modified_base 8: mod_base = OTHER; note = 5'-methyluridine-3'-phosphate
  modified_base 9: mod_base = OTHER; note = 5'-methyluridine-3'-phosphate
  modified_base 13: mod_base = OTHER; note = 5'-methyluridine-3'-phosphate
  modified_base 23: mod_base = OTHER; note = 5'-methyluridine
cagggctttgagtacaagagagt

SEQ ID NO: 3268 - RNA, 23 nt, synthetic construct
  source 1..23: mol_type = other RNA
  modified_base 4: mod_base = OTHER; note = 5'-methyluridine-3'-phosphate
  modified_base 10: mod_base = OTHER; note = 5'-methyluridine-3'-phosphate
  modified_base 14: mod_base = OTHER; note = 5'-methyluridine-3'-phosphate
  modified_base 21: mod_base = OTHER; note = 5'-methyluridine-3'-phosphate
cagtccagctgaatgaaacctgg

SEQ ID NO: 3269 - RNA, 23 nt, synthetic construct
  source 1..23: mol_type = other RNA
  modified_base 2: mod_base = OTHER; note = 5'-methyluridine-3'-phosphate
  modified_base 12: mod_base = OTHER; note = 5'-methyluridine-3'-phosphate
  modified_base 14: mod_base = OTHER; note = 5'-methyluridine-3'-phosphate
  modified_base 22: mod_base = OTHER; note = 5'-methyluridine-3'-phosphate
gtcaacagccatgtggacaactg

SEQ ID NO: 3270 - RNA, 23 nt, synthetic construct
  source 1..23: mol_type = other RNA
  modified_base 6: mod_base = OTHER; note = 5'-methyluridine-3'-phosphate
  modified_base 8: mod_base = OTHER; note = 5'-methyluridine-3'-phosphate
  modified_base 12: mod_base = OTHER; note = 5'-methyluridine-3'-phosphate
  modified_base 14: mod_base = OTHER; note = 5'-methyluridine-3'-phosphate
  modified_base 16: mod_base = OTHER; note = 5'-methyluridine-3'-phosphate
  modified_base 22: mod_base = OTHER; note = 5'-methyluridine-3'-phosphate
caccgtgtacctctgtgaggctg

SEQ ID NO: 3271 - RNA, 23 nt, synthetic construct
  source 1..23: mol_type = other RNA
  modified_base 5: mod_base = OTHER; note = 5'-methyluridine-3'-phosphate
  modified_base 10: mod_base = OTHER; note = 5'-methyluridine-3'-phosphate
  modified_base 14: mod_base = OTHER; note = 5'-methyluridine-3'-phosphate
  modified_base 15: mod_base = OTHER; note = 5'-methyluridine-3'-phosphate
  modified_base 16: mod_base = OTHER; note = 5'-methyluridine-3'-phosphate
  modified_base 19: mod_base = OTHER; note = 5'-methyluridine-3'-phosphate
agggtggagtccatttgctgacc

SEQ ID NO: 3272 - RNA, 23 nt, synthetic construct
  source 1..23: mol_type = other RNA
  modified_base 1: mod_base = OTHER; note = 5'-methyluridine-3'-phosphate
  modified_base 4: mod_base = OTHER; note = 5'-methyluridine-3'-phosphate
  modified_base 12: mod_base = OTHER; note = 5'-methyluridine-3'-phosphate
  modified_base 14: mod_base = OTHER; note = 5'-methyluridine-3'-phosphate
  modified_base 16: mod_base = OTHER; note = 5'-methyluridine-3'-phosphate
  modified_base 22: mod_base = OTHER; note = 5'-methyluridine-3'-phosphate
tcctgcccagatgtgtccagctg

SEQ ID NO: 3273 - RNA, 23 nt, synthetic construct
  source 1..23: mol_type = other RNA
  modified_base 2: mod_base = OTHER; note = 5'-methyluridine-3'-phosphate
  modified_base 5: mod_base = OTHER; note = 5'-methyluridine-3'-phosphate
  modified_base 8: mod_base = OTHER; note = 5'-methyluridine-3'-phosphate
  modified_base 11: mod_base = OTHER; note = 5'-methyluridine-3'-phosphate
  modified_base 14: mod_base = OTHER; note = 5'-methyluridine-3'-phosphate
  modified_base 16: mod_base = OTHER; note = 5'-methyluridine-3'-phosphate
ctgctgctactcctgtgaggagg

SEQ ID NO: 3274 - RNA, 23 nt, synthetic construct
  source 1..23: mol_type = other RNA
  modified_base 3: mod_base = OTHER; note = 5'-methyluridine-3'-phosphate
  modified_base 6: mod_base = OTHER; note = 5'-methyluridine-3'-phosphate
  modified_base 8: mod_base = OTHER; note = 5'-methyluridine-3'-phosphate
  modified_base 13: mod_base = OTHER; note = 5'-methyluridine-3'-phosphate
  modified_base 19: mod_base = OTHER; note = 5'-methyluridine-3'-phosphate
actcctgtcaagtccgcatcaac

SEQ ID NO: 3275 - RNA, 23 nt, synthetic construct
  source 1..23: mol_type = other RNA
  modified_base 8: mod_base = OTHER; note = 5'-methyluridine-3'-phosphate
  modified_base 11: mod_base = OTHER; note = 5'-methyluridine-3'-phosphate
  modified_base 13: mod_base = OTHER; note = 5'-methyluridine-3'-phosphate
acgaccatcctgtggcaccaggg

SEQ ID NO: 3276 - RNA, 23 nt, synthetic construct
  source 1..23: mol_type = other RNA
  modified_base 5: mod_base = OTHER; note = 5'-methyluridine-3'-phosphate
  modified_base 11: mod_base = OTHER; note = 5'-methyluridine-3'-phosphate
  modified_base 16: mod_base = OTHER; note = 5'-methyluridine-3'-phosphate
  modified_base 17: mod_base = OTHER; note = 5'-methyluridine-3'-phosphate
  modified_base 19: mod_base = OTHER; note = 5'-methyluridine-3'-phosphate
gaggtcaacatcaccttctgcga

SEQ ID NO: 3277 - RNA, 23 nt, synthetic construct
  source 1..23: mol_type = other RNA
  modified_base 5: mod_base = OTHER; note = 5'-methyluridine-3'-phosphate
  modified_base 11: mod_base = OTHER; note = 5'-methyluridine-3'-phosphate
  modified_base 14: mod_base = OTHER; note = 5'-methyluridine-3'-phosphate
agcgtccaagtactcagcagagg

SEQ ID NO: 3278 - RNA, 23 nt, synthetic construct
  source 1..23: mol_type = other RNA
  modified_base 4: mod_base = OTHER; note = 5'-methyluridine-3'-phosphate
  modified_base 15: mod_base = OTHER; note = 5'-methyluridine-3'-phosphate
  modified_base 21: mod_base = OTHER; note = 5'-methyluridine-3'-phosphate
ccatgcagcaccagtgcacctgc

SEQ ID NO: 3279 - RNA, 23 nt, synthetic construct
  source 1..23: mol_type = other RNA
  modified_base 2: mod_base = OTHER; note = 5'-methyluridine-3'-phosphate
  modified_base 7: mod_base = OTHER; note = 5'-methyluridine-3'-phosphate
  modified_base 8: mod_base = OTHER; note = 5'-methyluridine-3'-phosphate
  modified_base 13: mod_base = OTHER; note = 5'-methyluridine-3'-phosphate
  modified_base 15: mod_base = OTHER; note = 5'-methyluridine-3'-phosphate
  modified_base 18: mod_base = OTHER; note = 5'-methyluridine-3'-phosphate
gtgcccttgcactgtcctaacgg

SEQ ID NO: 3280 - RNA, 23 nt, synthetic construct
  source 1..23: mol_type = other RNA
  modified_base 1: mod_base = OTHER; note = 5'-methyluridine-3'-phosphate
  modified_base 4: mod_base = OTHER; note = 5'-methyluridine-3'-phosphate
  modified_base 12: mod_base = OTHER; note = 5'-methyluridine-3'-phosphate
  modified_base 22: mod_base = OTHER; note = 5'-methyluridine-3'-phosphate
tcctgcacacctacacccacgtg

SEQ ID NO: 3281 - RNA, 23 nt, synthetic construct
  source 1..23: mol_type = other RNA
  modified_base 2: mod_base = OTHER; note = 5'-methyluridine-3'-phosphate
  modified_base 11: mod_base = OTHER; note = 5'-methyluridine-3'-phosphate
  modified_base 12: mod_base = OTHER; note = 5'-methyluridine-3'-phosphate
  modified_base 14: mod_base = OTHER; note = 5'-methyluridine-3'-phosphate
  modified_base 16: mod_base = OTHER; note = 5'-methyluridine-3'-phosphate
  modified_base 18: mod_base = OTHER; note = 5'-methyluridine-3'-phosphate
  modified_base 22: mod_base = OTHER; note = 5'-methyluridine-3'-phosphate
ctgcacgcccttctgtgtccctg

SEQ ID NO: 3282 - RNA, 23 nt, synthetic construct
  source 1..23: mol_type = other RNA
  modified_base 5: mod_base = OTHER; note = 5'-methyluridine-3'-phosphate
  modified_base 8: mod_base = OTHER; note = 5'-methyluridine-3'-phosphate
  modified_base 10: mod_base = OTHER; note = 5'-methyluridine-3'-phosphate
  modified_base 12: mod_base = OTHER; note = 5'-methyluridine-3'-phosphate
  modified_base 20: mod_base = OTHER; note = 5'-methyluridine-3'-phosphate
  modified_base 21: mod_base = OTHER; note = 5'-methyluridine-3'-phosphate
  modified_base 23: mod_base = OTHER; note = 5'-methyluridine
ccactgctgtctgagaacgttct

SEQ ID NO: 3283 - RNA, 23 nt, synthetic construct
  source 1..23: mol_type = other RNA
  modified_base 5: mod_base = OTHER; note = 5'-methyluridine-3'-phosphate
  modified_base 8: mod_base = OTHER; note = 5'-methyluridine-3'-phosphate
  modified_base 10: mod_base = OTHER; note = 5'-methyluridine-3'-phosphate
  modified_base 12: mod_base = OTHER; note = 5'-methyluridine-3'-phosphate
  modified_base 18: mod_base = OTHER; note = 5'-methyluridine-3'-phosphate
cccatgctctgtccacctggagc

SEQ ID NO: 3284 - RNA, 23 nt, synthetic construct
  source 1..23: mol_type = other RNA
  modified_base 2: mod_base = OTHER; note = 5'-methyluridine-3'-phosphate
  modified_base 6: mod_base = OTHER; note = 5'-methyluridine-3'-phosphate
  modified_base 7: mod_base = OTHER; note = 5'-methyluridine-3'-phosphate
  modified_base 9: mod_base = OTHER; note = 5'-methyluridine-3'-phosphate
  modified_base 11: mod_base = OTHER; note = 5'-methyluridine-3'-phosphate
  modified_base 14: mod_base = OTHER; note = 5'-methyluridine-3'-phosphate
  modified_base 17: mod_base = OTHER; note = 5'-methyluridine-3'-phosphate
gtgcattgtctgatcatgaaaac

SEQ ID NO: 3285 - RNA, 23 nt, synthetic construct
  source 1..23: mol_type = other RNA
  modified_base 11: mod_base = OTHER; note = 5'-methyluridine-3'-phosphate
  modified_base 18: mod_base = OTHER; note = 5'-methyluridine-3'-phosphate
  modified_base 21: mod_base = OTHER; note = 5'-methyluridine-3'-phosphate
agggcgccactcaggagtcctac

SEQ ID NO: 3286 - RNA, 23 nt, synthetic construct
  source 1..23: mol_type = other RNA
  modified_base 4: mod_base = OTHER; note = 5'-methyluridine-3'-phosphate
  modified_base 8: mod_base = OTHER; note = 5'-methyluridine-3'-phosphate
  modified_base 11: mod_base = OTHER; note = 5'-methyluridine-3'-phosphate
  modified_base 13: mod_base = OTHER; note = 5'-methyluridine-3'-phosphate
  modified_base 17: mod_base = OTHER; note = 5'-methyluridine-3'-phosphate
ccctccctgatgtcactgggacg

SEQ ID NO: 3287 - RNA, 23 nt, synthetic construct
  source 1..23: mol_type = other RNA
  modified_base 4: mod_base = OTHER; note = 5'-methyluridine-3'-phosphate
  modified_base 14: mod_base = OTHER; note = 5'-methyluridine-3'-phosphate
  modified_base 20: mod_base = OTHER; note = 5'-methyluridine-3'-phosphate
  modified_base 22: mod_base = OTHER; note = 5'-methyluridine-3'-phosphate
ccctggaacaaactaagcatgtg

SEQ ID NO: 3288 - RNA, 23 nt, synthetic construct
  source 1..23: mol_type = other RNA
  modified_base 10: mod_base = OTHER; note = 5'-methyluridine-3'-phosphate
  modified_base 11: mod_base = OTHER; note = 5'-methyluridine-3'-phosphate
  modified_base 17: mod_base = OTHER; note = 5'-methyluridine-3'-phosphate
cagcacggattccagctggccac

SEQ ID NO: 3289 - RNA, 23 nt, synthetic construct
  source 1..23: mol_type = other RNA
  modified_base 10: mod_base = OTHER; note = 5'-methyluridine-3'-phosphate
  modified_base 13: mod_base = OTHER; note = 5'-methyluridine-3'-phosphate
cagacaggctggtccaggcaagg

SEQ ID NO: 3290 - RNA, 23 nt, synthetic construct
  source 1..23: mol_type = other RNA
  modified_base 2: mod_base = OTHER; note = 5'-methyluridine-3'-phosphate
  modified_base 5: mod_base = OTHER; note = 5'-methyluridine-3'-phosphate
  modified_base 16: mod_base = OTHER; note = 5'-methyluridine-3'-phosphate
ctgctgccaggaagctgcgacag

SEQ ID NO: 3291 - RNA, 23 nt, synthetic construct
  source 1..23: mol_type = other RNA
  modified_base 2: mod_base = OTHER; note = 5'-methyluridine-3'-phosphate
  modified_base 9: mod_base = OTHER; note = 5'-methyluridine-3'-phosphate
  modified_base 13: mod_base = OTHER; note = 5'-methyluridine-3'-phosphate
  modified_base 20: mod_base = OTHER; note = 5'-methyluridine-3'-phosphate
ctgcagggtaactcagggctgag

SEQ ID NO: 3292 - RNA, 23 nt, synthetic construct
  source 1..23: mol_type = other RNA
  modified_base 1: mod_base = OTHER; note = 5'-methyluridine-3'-phosphate
  modified_base 15: mod_base = OTHER; note = 5'-methyluridine-3'-phosphate
tcgcaacggccaggtcagagagg

SEQ ID NO: 3293 - RNA, 23 nt, synthetic construct
  source 1..23: mol_type = other RNA
  modified_base 10: mod_base = OTHER; note = 5'-methyluridine-3'-phosphate
  modified_base 11: mod_base = OTHER; note = 5'-methyluridine-3'-phosphate
  modified_base 12: mod_base = OTHER; note = 5'-methyluridine-3'-phosphate
  modified_base 13: mod_base = OTHER; note = 5'-methyluridine-3'-phosphate
  modified_base 19: mod_base = OTHER; note = 5'-methyluridine-3'-phosphate
ccagcccagttttgcaaataaac

SEQ ID NO: 3294 - RNA, 21 nt, synthetic construct
  source 1..21: mol_type = other RNA
ttggctctggcggccatgctc

SEQ ID NO: 3295 - RNA, 21 nt, synthetic construct
  source 1..21: mol_type = other RNA
ctgggagaatgcagggcacac

SEQ ID NO: 3296 - RNA, 21 nt, synthetic construct
  source 1..21: mol_type = other RNA
gcgcgtgagctttgttccacc

SEQ ID NO: 3297 - RNA, 21 nt, synthetic construct
  source 1..21: mol_type = other RNA
tgggcgggtgtgcagcacctg

SEQ ID NO: 3298 - RNA, 21 nt, synthetic construct
  source 1..21: mol_type = other RNA
ccactacaagaccttcgacgg

SEQ ID NO: 3299 - RNA, 21 nt, synthetic construct
  source 1..21: mol_type = other RNA
cctttgcaactacgtgttctc

SEQ ID NO: 3300 - RNA, 21 nt, synthetic construct
  source 1..21: mol_type = other RNA
acccgtgttgtcatcaaggcc

SEQ ID NO: 3301 - RNA, 21 nt, synthetic construct
  source 1..21: mol_type = other RNA
ggctccgtcctcatcaatggg

SEQ ID NO: 3302 - RNA, 21 nt, synthetic construct
  source 1..21: mol_type = other RNA
gctgccttacagccgcactgg

SEQ ID NO: 3303 - RNA, 21 nt, synthetic construct
  source 1..21: mol_type = other RNA
gactacatcaaggtcagcatc

SEQ ID NO: 3304 - RNA, 21 nt, synthetic construct
  source 1..21: mol_type = other RNA
gctgacattcctgtggaacgg

SEQ ID NO: 3305 - RNA, 21 nt, synthetic construct
  source 1..21: mol_type = other RNA
ctggatcccaaatacgccaac

SEQ ID NO: 3306 - RNA, 21 nt, synthetic construct
  source 1..21: mol_type = other RNA
gccttcaacgagttctatgcc

SEQ ID NO: 3307 - RNA, 21 nt, synthetic construct
  source 1..21: mol_type = other RNA
aacctgcagaagttggatggg

SEQ ID NO: 3308 - RNA, 21 nt, synthetic construct
  source 1..21: mol_type = other RNA
tgcacggacgaggagggcatc

SEQ ID NO: 3309 - RNA, 21 nt, synthetic construct
  source 1..21: mol_type = other RNA
tttgcggagtgccacgcactg

SEQ ID NO: 3310 - RNA, 21 nt, synthetic construct
  source 1..21: mol_type = other RNA
gacagcactgcgtacctggcc

SEQ ID NO: 3311 - RNA, 21 nt, synthetic construct
  source 1..21: mol_type = other RNA
ctggaggtgccctgagctctg

SEQ ID NO: 3312 - RNA, 21 nt, synthetic construct
  source 1..21: mol_type = other RNA
ctcaacatgcagcaccaggag

SEQ ID NO: 3313 - RNA, 21 nt, synthetic construct
  source 1..21: mol_type = other RNA
accctgcacggacacctgctc

SEQ ID NO: 3314 - RNA, 21 nt, synthetic construct
  source 1..21: mol_type = other RNA
ggaccactgtgtggacggctg

SEQ ID NO: 3315 - RNA, 21 nt, synthetic construct
  source 1..21: mol_type = other RNA
gctggatgacatcacgcactc

SEQ ID NO: 3316 - RNA, 21 nt, synthetic construct
  source 1..21: mol_type = other RNA
ctccttcaacaccacctgcag

SEQ ID NO: 3317 - RNA, 21 nt, synthetic construct
  source 1..21: mol_type = other RNA
ctatggcagtgccaggacctg

SEQ ID NO: 3318 - RNA, 21 nt, synthetic construct
  source 1..21: mol_type = other RNA
acctatgatgagaaactctac

SEQ ID NO: 3319 - RNA, 21 nt, synthetic construct
  source 1..21: mol_type = other RNA
gacagcagcttcaccgtgctg

SEQ ID NO: 3320 - RNA, 21 nt, synthetic construct
  source 1..21: mol_type = other RNA
tcctcaactccatctacacgc

SEQ ID NO: 3321 - RNA, 21 nt, synthetic construct
  source 1..21: mol_type = other RNA
tcgagcttcttcatcgtggtg

SEQ ID NO: 3322 - RNA, 21 nt, synthetic construct
  source 1..21: mol_type = other RNA
gccactcatgcaggtgtttgt

SEQ ID NO: 3323 - RNA, 21 nt, synthetic construct
  source 1..21: mol_type = other RNA
gggaacttcaaccagaaccag

SEQ ID NO: 3324 - RNA, 21 nt, synthetic construct
  source 1..21: mol_type = other RNA
tgacgacttcacggccctcag

SEQ ID NO: 3325 - RNA, 21 nt, synthetic construct
  source 1..21: mol_type = other RNA
ccaggaacagctttgaggacc

SEQ ID NO: 3326 - RNA, 21 nt, synthetic construct
  source 1..21: mol_type = other RNA
gtggagaatgagaactacgcc

SEQ ID NO: 3327 - RNA, 21 nt, synthetic construct
  source 1..21: mol_type = other RNA
caacagtgccttctcgcgctg

SEQ ID NO: 3328 - RNA, 21 nt, synthetic construct
  source 1..21: mol_type = other RNA
cacctgcaactgtgagcggag

SEQ ID NO: 3329 - RNA, 21 nt, synthetic construct
  source 1..21: mol_type = other RNA
cctcctatgtgcacgcctgtg

SEQ ID NO: 3330 - RNA, 21 nt, synthetic construct
  source 1..21: mol_type = other RNA
ggcgtacagctcagcgactgg

SEQ ID NO: 3331 - RNA, 21 nt, synthetic construct
  source 1..21: mol_type = other RNA
accaagtacatgcagaactgc

SEQ ID NO: 3332 - RNA, 21 nt, synthetic construct
  source 1..21: mol_type = other RNA
tacgcctacgtggtggatgcc

SEQ ID NO: 3333 - RNA, 21 nt, synthetic construct
  source 1..21: mol_type = other RNA
gcagcgtttccttcgtgcctg

SEQ ID NO: 3334 - RNA, 21 nt, synthetic construct
  source 1..21: mol_type = other RNA
gcaccttcctcaatgacgcgg

SEQ ID NO: 3335 - RNA, 21 nt, synthetic construct
  source 1..21: mol_type = other RNA
ctggagaggtggtgcacgacg

SEQ ID NO: 3336 - RNA, 21 nt, synthetic construct
  source 1..21: mol_type = other RNA
ccgtgtgttcatgtacgggtg

SEQ ID NO: 3337 - RNA, 21 nt, synthetic construct
  source 1..21: mol_type = other RNA
cctctctgcagaaaagcacag

SEQ ID NO: 3338 - RNA, 21 nt, synthetic construct
  source 1..21: mol_type = other RNA
ggactgcagcaacagctcggc

SEQ ID NO: 3339 - RNA, 21 nt, synthetic construct
  source 1..21: mol_type = other RNA
ctgtttcagcacacactgcgt

SEQ ID NO: 3340 - RNA, 21 nt, synthetic construct
  source 1..21: mol_type = other RNA
ctgcattgccgaggaggactg

SEQ ID NO: 3341 - RNA, 21 nt, synthetic construct
  source 1..21: mol_type = other RNA
cacctacaagcctggagagac

SEQ ID NO: 3342 - RNA, 21 nt, synthetic construct
  source 1..21: mol_type = other RNA
cgactgcaacacctgcacctg

SEQ ID NO: 3343 - RNA, 21 nt, synthetic construct
  source 1..21: mol_type = other RNA
gaaccggaggtgggagtgcag

SEQ ID NO: 3344 - RNA, 21 nt, synthetic construct
  source 1..21: mol_type = other RNA
cgatcgctacagctttgaagg

SEQ ID NO: 3345 - RNA, 21 nt, synthetic construct
  source 1..21: mol_type = other RNA
gctgcgagtacatcttggccc

SEQ ID NO: 3346 - RNA, 21 nt, synthetic construct
  source 1..21: mol_type = other RNA
gccatcaagctcttcgtggag

SEQ ID NO: 3347 - RNA, 21 nt, synthetic construct
  source 1..21: mol_type = other RNA
tacgagctgatcctccaagag

SEQ ID NO: 3348 - RNA, 21 nt, synthetic construct
  source 1..21: mol_type = other RNA
gacctttaaggcggtggcgag

SEQ ID NO: 3349 - RNA, 21 nt, synthetic construct
  source 1..21: mol_type = other RNA
accctacaagatacgctacat

SEQ ID NO: 3350 - RNA, 21 nt, synthetic construct
  source 1..21: mol_type = other RNA
ttcctggtcatcgagacccac

SEQ ID NO: 3351 - RNA, 21 nt, synthetic construct
  source 1..21: mol_type = other RNA
ccagcgtgttcatccgactgc

SEQ ID NO: 3352 - RNA, 21 nt, synthetic construct
  source 1..21: mol_type = other RNA
caggactacaagggcagggtc

SEQ ID NO: 3353 - RNA, 21 nt, synthetic construct
  source 1..21: mol_type = other RNA
gggaacttcgacgacaatgcc

SEQ ID NO: 3354 - RNA, 21 nt, synthetic construct
  source 1..21: mol_type = other RNA
caatgactttgccacgcgtag

SEQ ID NO: 3355 - RNA, 21 nt, synthetic construct
  source 1..21: mol_type = other RNA
gcactggagtttgggaacagc

SEQ ID NO: 3356 - RNA, 21 nt, synthetic construct
  source 1..21: mol_type = other RNA
ggcccagaagcagtgcagcat

SEQ ID NO: 3357 - RNA, 21 nt, synthetic construct
  source 1..21: mol_type = other RNA
cgaggcctgcgtgaacgacgc

SEQ ID NO: 3358 - RNA, 21 nt, synthetic construct
  source 1..21: mol_type = other RNA
actgcgagtgtttctgcacgg

SEQ ID NO: 3359 - RNA, 21 nt, synthetic construct
  source 1..21: mol_type = other RNA
tgtgtgtgtcctggcggactc

SEQ ID NO: 3360 - RNA, 21 nt, synthetic construct
  source 1..21: mol_type = other RNA
tgttctgtgacttctacaacc

SEQ ID NO: 3361 - RNA, 21 nt, synthetic construct
  source 1..21: mol_type = other RNA
tgtgagtggcactaccagccc

SEQ ID NO: 3362 - RNA, 21 nt, synthetic construct
  source 1..21: mol_type = other RNA
gctgctacccgaagtgcccac

SEQ ID NO: 3363 - RNA, 21 nt, synthetic construct
  source 1..21: mol_type = other RNA
agcccttcttcaatgaggacc

SEQ ID NO: 3364 - RNA, 21 nt, synthetic construct
  source 1..21: mol_type = other RNA
aagtgcgtggcccagtgtggc

SEQ ID NO: 3365 - RNA, 21 nt, synthetic construct
  source 1..21: mol_type = other RNA
tgacgtcggtgcaagggtccc

SEQ ID NO: 3366 - RNA, 21 nt, synthetic construct
  source 1..21: mol_type = other RNA
ccagagctgtaactgcacacc

SEQ ID NO: 3367 - RNA, 21 nt, synthetic construct
  source 1..21: mol_type = other RNA
cagtgcgctcacagccttgag

SEQ ID NO: 3368 - RNA, 21 nt, synthetic construct
  source 1..21: mol_type = other RNA
ctgcacctatgaggacaggac

SEQ ID NO: 3369 - RNA, 21 nt, synthetic construct
  source 1..21: mol_type = other RNA
caggacgtcatctacaacacc

SEQ ID NO: 3370 - RNA, 21 nt, synthetic construct
  source 1..21: mol_type = other RNA
cgcctgcttgatcgccatctg

SEQ ID NO: 3371 - RNA, 21 nt, synthetic construct
  source 1..21: mol_type = other RNA
accatcatcaggaaggctgtg

SEQ ID NO: 3372 - RNA, 21 nt, synthetic construct
  source 1..21: mol_type = other RNA
cacaacgccattcaccttcac

SEQ ID NO: 3373 - RNA, 21 nt, synthetic construct
  source 1..21: mol_type = other RNA
tccaccgtgtgtgtccgcgag

SEQ ID NO: 3374 - RNA, 21 nt, synthetic construct
  source 1..21: mol_type = other RNA
tccagctggtacaatgggcac

SEQ ID NO: 3375 - RNA, 21 nt, synthetic construct
  source 1..21: mol_type = other RNA
gagggtaccaggtatgccctg

SEQ ID NO: 3376 - RNA, 21 nt, synthetic construct
  source 1..21: mol_type = other RNA
ctggctgacatcgagtgccgg

SEQ ID NO: 3377 - RNA, 21 nt, synthetic construct
  source 1..21: mol_type = other RNA
cttcccgacatgccgctggag

SEQ ID NO: 3378 - RNA, 21 nt, synthetic construct
  source 1..21: mol_type = other RNA
caggtggactgtgaccgcatg

SEQ ID NO: 3379 - RNA, 21 nt, synthetic construct
  source 1..21: mol_type = other RNA
cgccaacagccaacagagtcc

SEQ ID NO: 3380 - RNA, 21 nt, synthetic construct
  source 1..21: mol_type = other RNA
tctgtcacgactacgagctgc

SEQ ID NO: 3381 - RNA, 21 nt, synthetic construct
  source 1..21: mol_type = other RNA
tctctgctgcgaatacgtgcc

SEQ ID NO: 3382 - RNA, 21 nt, synthetic construct
  source 1..21: mol_type = other RNA
cacggagcctgctgtgcctac

SEQ ID NO: 3383 - RNA, 21 nt, synthetic construct
  source 1..21: mol_type = other RNA
cacctcgcagactgggtccag

SEQ ID NO: 3384 - RNA, 21 nt, synthetic construct
  source 1..21: mol_type = other RNA
acagagtggtttgatgaggac

SEQ ID NO: 3385 - RNA, 21 nt, synthetic construct
  source 1..21: mol_type = other RNA
gacgttgagtcctacgataag

SEQ ID NO: 3386 - RNA, 21 nt, synthetic construct
  source 1..21: mol_type = other RNA
ggccgctggagggcacttatg

SEQ ID NO: 3387 - RNA, 21 nt, synthetic construct
  source 1..21: mol_type = other RNA
cagcctaaggacatagagtgc

SEQ ID NO: 3388 - RNA, 21 nt, synthetic construct
  source 1..21: mol_type = other RNA
aactggaccctggcacaggtg

SEQ ID NO: 3389 - RNA, 21 nt, synthetic construct
  source 1..21: mol_type = other RNA
gtgcactgtgacgtccacttc

SEQ ID NO: 3390 - RNA, 21 nt, synthetic construct
  source 1..21: mol_type = other RNA
ctgctgcagtgacgaccactg

SEQ ID NO: 3391 - RNA, 21 nt, synthetic construct
  source 1..21: mol_type = other RNA
cgaccacagagctggagacgg

SEQ ID NO: 3392 - RNA, 21 nt, synthetic construct
  source 1..21: mol_type = other RNA
gccctgttctcaacgccgcag

SEQ ID NO: 3393 - RNA, 21 nt, synthetic construct
  source 1..21: mol_type = other RNA
cctctcagaaggactgacatc

SEQ ID NO: 3394 - RNA, 21 nt, synthetic construct
  source 1..21: mol_type = other RNA
cagatacacaagcacccttgg

SEQ ID NO: 3395 - RNA, 21 nt, synthetic construct
  source 1..21: mol_type = other RNA
gctccacagaacccactgtcc

SEQ ID NO: 3396 - RNA, 21 nt, synthetic construct
  source 1..21: mol_type = other RNA
cacccttccaacacgctcagc

SEQ ID NO: 3397 - RNA, 21 nt, synthetic construct
  source 1..21: mol_type = other RNA
cgcttccaaagagccgctgac

SEQ ID NO: 3398 - RNA, 21 nt, synthetic construct
  source 1..21: mol_type = other RNA
gcgccaacactcacgagcgag

SEQ ID NO: 3399 - RNA, 21 nt, synthetic construct
  source 1..21: mol_type = other RNA
gtccacctctcaggccgagac

SEQ ID NO: 3400 - RNA, 21 nt, synthetic construct
  source 1..21: mol_type = other RNA
caggacagagacgacaatgag

SEQ ID NO: 3401 - RNA, 21 nt, synthetic construct
  source 1..21: mol_type = other RNA
cttgactaacaccaccaccag

SEQ ID NO: 3402 - RNA, 21 nt, synthetic construct
  source 1..21: mol_type = other RNA
ctgtcaaccgaagtgtgagtg

SEQ ID NO: 3403 - RNA, 21 nt, synthetic construct
  source 1..21: mol_type = other RNA
agagtggtttgacgtggactt

SEQ ID NO: 3404 - RNA, 21 nt, synthetic construct
  source 1..21: mol_type = other RNA
ggaaacttttgaaaacatcag

SEQ ID NO: 3405 - RNA, 21 nt, synthetic construct
  source 1..21: mol_type = other RNA
gcaccaaagagcatagagtgc

SEQ ID NO: 3406 - RNA, 21 nt, synthetic construct
  source 1..21: mol_type = other RNA
cgaggtaagcatcgaccaggt

SEQ ID NO: 3407 - RNA, 21 nt, synthetic construct
  source 1..21: mol_type = other RNA
ctgacctgcagcctggagacg

SEQ ID NO: 3408 - RNA, 21 nt, synthetic construct
  source 1..21: mol_type = other RNA
ctgcaagaacgaagaccagac

SEQ ID NO: 3409 - RNA, 21 nt, synthetic construct
  source 1..21: mol_type = other RNA
tgcttcaactacaacgtgcgt

SEQ ID NO: 3410 - RNA, 21 nt, synthetic construct
  source 1..21: mol_type = other RNA
tccaccctgagaacagctccc

SEQ ID NO: 3411 - RNA, 21 nt, synthetic construct
  source 1..21: mol_type = other RNA
tcccaaagtgctgaccaccac

SEQ ID NO: 3412 - RNA, 21 nt, synthetic construct
  source 1..21: mol_type = other RNA
cagctccaaagccactccctc

SEQ ID NO: 3413 - RNA, 21 nt, synthetic construct
  source 1..21: mol_type = other RNA
ccagtccagggactgcaaccg

SEQ ID NO: 3414 - RNA, 21 nt, synthetic construct
  source 1..21: mol_type = other RNA
agcactgagaagcacagccac

SEQ ID NO: 3415 - RNA, 21 nt, synthetic construct
  source 1..21: mol_type = other RNA
ctaccagcgttacacccatcc

SEQ ID NO: 3416 - RNA, 21 nt, synthetic construct
  source 1..21: mol_type = other RNA
ttcctccctgggcaccacctg

SEQ ID NO: 3417 - RNA, 21 nt, synthetic construct
  source 1..21: mol_type = other RNA
cctatcacagaccaccacacc

SEQ ID NO: 3418 - RNA, 21 nt, synthetic construct
  source 1..21: mol_type = other RNA
ccaccatgtccacagccacac

SEQ ID NO: 3419 - RNA, 21 nt, synthetic construct
  source 1..21: mol_type = other RNA
tcctccactccagagactgcc

SEQ ID NO: 3420 - RNA, 21 nt, synthetic construct
  source 1..21: mol_type = other RNA
ctccacagtgcttaccgccac

SEQ ID NO: 3421 - RNA, 21 nt, synthetic construct
  source 1..21: mol_type = other RNA
tgccaactaccacaaccacgg

SEQ ID NO: 3422 - RNA, 21 nt, synthetic construct
  source 1..21: mol_type = other RNA
tccagtgtggatcagcacaac

SEQ ID NO: 3423 - RNA, 21 nt, synthetic construct
  source 1..21: mol_type = other RNA
acccacaaccagaggctccac

SEQ ID NO: 3424 - RNA, 21 nt, synthetic construct
  source 1..21: mol_type = other RNA
cgccacagtgctgaccaccac

SEQ ID NO: 3425 - RNA, 21 nt, synthetic construct
  source 1..21: mol_type = other RNA
ctcctctagcacacagaccag

SEQ ID NO: 3426 - RNA, 21 nt, synthetic construct
  source 1..21: mol_type = other RNA
ggccactacgatcacggccac

SEQ ID NO: 3427 - RNA, 21 nt, synthetic construct
  source 1..21: mol_type = other RNA
ctcctcaactcctgggacaac

SEQ ID NO: 3428 - RNA, 21 nt, synthetic construct
  source 1..21: mol_type = other RNA
cagcaacacagtgactccctc

SEQ ID NO: 3429 - RNA, 21 nt, synthetic construct
  source 1..21: mol_type = other RNA
tgccctagggaccacccacac

SEQ ID NO: 3430 - RNA, 21 nt, synthetic construct
  source 1..21: mol_type = other RNA
agtgccgaacaccatggccac

SEQ ID NO: 3431 - RNA, 21 nt, synthetic construct
  source 1..21: mol_type = other RNA
agcctggacttcggccacctc

SEQ ID NO: 3432 - RNA, 21 nt, synthetic construct
  source 1..21: mol_type = other RNA
acccacatcacagagccttcc

SEQ ID NO: 3433 - RNA, 21 nt, synthetic construct
  source 1..21: mol_type = other RNA
ggtgacttcccacaccctagc

SEQ ID NO: 3434 - RNA, 21 nt, synthetic construct
  source 1..21: mol_type = other RNA
caaccaccggtaccacccagc

SEQ ID NO: 3435 - RNA, 21 nt, synthetic construct
  source 1..21: mol_type = other RNA
cgactccagccctttccagcc

SEQ ID NO: 3436 - RNA, 21 nt, synthetic construct
  source 1..21: mol_type = other RNA
tagcagcagaaccaccgagtc

SEQ ID NO: 3437 - RNA, 21 nt, synthetic construct
  source 1..21: mol_type = other RNA
acccagcaagacccgcacctc

SEQ ID NO: 3438 - RNA, 21 nt, synthetic construct
  source 1..21: mol_type = other RNA
cggtggtgaccatgggctgtg

SEQ ID NO: 3439 - RNA, 21 nt, synthetic construct
  source 1..21: mol_type = other RNA
gtggctggactacagctaccc

SEQ ID NO: 3440 - RNA, 21 nt, synthetic construct
  source 1..21: mol_type = other RNA
ttgacacctactccaacatcc

SEQ ID NO: 3441 - RNA, 21 nt, synthetic construct
  source 1..21: mol_type = other RNA
ttgggccaggtcgtggaatgc

SEQ ID NO: 3442 - RNA, 21 nt, synthetic construct
  source 1..21: mol_type = other RNA
cctggactttggcctggtctg

SEQ ID NO: 3443 - RNA, 21 nt, synthetic construct
  source 1..21: mol_type = other RNA
atgtgcttcaactatgaaatc

SEQ ID NO: 3444 - RNA, 21 nt, synthetic construct
  source 1..21: mol_type = other RNA
tgtgttctgctgcaactacgg

SEQ ID NO: 3445 - RNA, 21 nt, synthetic construct
  source 1..21: mol_type = other RNA
cagctctacggccatgccctc

SEQ ID NO: 3446 - RNA, 21 nt, synthetic construct
  source 1..21: mol_type = other RNA
ccactacgactgagtccactg

SEQ ID NO: 3447 - RNA, 21 nt, synthetic construct
  source 1..21: mol_type = other RNA
gagcactacagccaccgtgac

SEQ ID NO: 3448 - RNA, 21 nt, synthetic construct
  source 1..21: mol_type = other RNA
cctccacccaggcaactgctg

SEQ ID NO: 3449 - RNA, 21 nt, synthetic construct
  source 1..21: mol_type = other RNA
ggccacgacacccacagtcac

SEQ ID NO: 3450 - RNA, 21 nt, synthetic construct
  source 1..21: mol_type = other RNA
acagctaccagctttacagcc

SEQ ID NO: 3451 - RNA, 21 nt, synthetic construct
  source 1..21: mol_type = other RNA
tcctccactccagagactgtc

SEQ ID NO: 3452 - RNA, 21 nt, synthetic construct
  source 1..21: mol_type = other RNA
ccacagtgcttaccaccacgg

SEQ ID NO: 3453 - RNA, 21 nt, synthetic construct
  source 1..21: mol_type = other RNA
gctcacactaccaaagtgctg

SEQ ID NO: 3454 - RNA, 21 nt, synthetic construct
  source 1..21: mol_type = other RNA
taccacaaccacgggcttcac

SEQ ID NO: 3455 - RNA, 21 nt, synthetic construct
  source 1..21: mol_type = other RNA
cacgcttccagtgtggatcag

SEQ ID NO: 3456 - RNA, 21 nt, synthetic construct
  source 1..21: mol_type = other RNA
acccacaaccagaggttccac

SEQ ID NO: 3457 - RNA, 21 nt, synthetic construct
  source 1..21: mol_type = other RNA
tgaccaccaccaccacaactg

SEQ ID NO: 3458 - RNA, 21 nt, synthetic construct
  source 1..21: mol_type = other RNA
ctcctcaactccagggacaac

SEQ ID NO: 3459 - RNA, 21 nt, synthetic construct
  source 1..21: mol_type = other RNA
cagcagcacagtgactccctc

SEQ ID NO: 3460 - RNA, 21 nt, synthetic construct
  source 1..21: mol_type = other RNA
cacacacgggcgatccctgtc

SEQ ID NO: 3461 - RNA, 21 nt, synthetic construct
  source 1..21: mol_type = other RNA
ccacccagcactcgactccag

SEQ ID NO: 3462 - RNA, 21 nt, synthetic construct
  source 1..21: mol_type = other RNA
cagccctcaccctagcagcag

SEQ ID NO: 3463 - RNA, 21 nt, synthetic construct
  source 1..21: mol_type = other RNA
ctggatcctcacagagcagac

SEQ ID NO: 3464 - RNA, 21 nt, synthetic construct
  source 1..21: mol_type = other RNA
tcccaaagtgctgaccagcac

SEQ ID NO: 3465 - RNA, 21 nt, synthetic construct
  source 1..21: mol_type = other RNA
cagttccaaagccacttcctc

SEQ ID NO: 3466 - RNA, 21 nt, synthetic construct
  source 1..21: mol_type = other RNA
caaggactgcaaccacccttc

SEQ ID NO: 3467 - RNA, 21 nt, synthetic construct
  source 1..21: mol_type = other RNA
gtgctgacaagcacagccacc

SEQ ID NO: 3468 - RNA, 21 nt, synthetic construct
  source 1..21: mol_type = other RNA
cacagctaccagctttacacc

SEQ ID NO: 3469 - RNA, 21 nt, synthetic construct
  source 1..21: mol_type = other RNA
ctccttcacccttgggaccac

SEQ ID NO: 3470 - RNA, 21 nt, synthetic construct
  source 1..21: mol_type = other RNA
cccagaacagaccaccacacc

SEQ ID NO: 3471 - RNA, 21 nt, synthetic construct
  source 1..21: mol_type = other RNA
caccatgtccacaatccaccc

SEQ ID NO: 3472 - RNA, 21 nt, synthetic construct
  source 1..21: mol_type = other RNA
ggccaccagttccatgtccac

SEQ ID NO: 3473 - RNA, 21 nt, synthetic construct
  source 1..21: mol_type = other RNA
ccactacaactgcagccactg

SEQ ID NO: 3474 - RNA, 21 nt, synthetic construct
  source 1..21: mol_type = other RNA
cagcactacagccaccgtgac

SEQ ID NO: 3475 - RNA, 21 nt, synthetic construct
  source 1..21: mol_type = other RNA
accctcaaagtgctgaccagc

SEQ ID NO: 3476 - RNA, 21 nt, synthetic construct
  source 1..21: mol_type = other RNA
acccacagtcatcagctccag

SEQ ID NO: 3477 - RNA, 21 nt, synthetic construct
  source 1..21: mol_type = other RNA
ccactccctcctccagtccag

SEQ ID NO: 3478 - RNA, 21 nt, synthetic construct
  source 1..21: mol_type = other RNA
ctaccagcgttacagccatcc

SEQ ID NO: 3479 - RNA, 21 nt, synthetic construct
  source 1..21: mol_type = other RNA
cctctactccagagactgtcc

SEQ ID NO: 3480 - RNA, 21 nt, synthetic construct
  source 1..21: mol_type = other RNA
agctcacactaccaaagtgcc

SEQ ID NO: 3481 - RNA, 21 nt, synthetic construct
  source 1..21: mol_type = other RNA
ggccactacgatcacagccac

SEQ ID NO: 3482 - RNA, 21 nt, synthetic construct
  source 1..21: mol_type = other RNA
caccacggccaccacacacgg

SEQ ID NO: 3483 - RNA, 21 nt, synthetic construct
  source 1..21: mol_type = other RNA
cctccaggaccacagccacag

SEQ ID NO: 3484 - RNA, 21 nt, synthetic construct
  source 1..21: mol_type = other RNA
accacggtggtgaccacgggc

SEQ ID NO: 3485 - RNA, 21 nt, synthetic construct
  source 1..21: mol_type = other RNA
cggccacgccctcctcaactc

SEQ ID NO: 3486 - RNA, 21 nt, synthetic construct
  source 1..21: mol_type = other RNA
ctggatcctcacaaagctgac

SEQ ID NO: 3487 - RNA, 21 nt, synthetic construct
  source 1..21: mol_type = other RNA
acccacaaccagtggctccac

SEQ ID NO: 3488 - RNA, 21 nt, synthetic construct
  source 1..21: mol_type = other RNA
atccactggatccacggccac

SEQ ID NO: 3489 - RNA, 21 nt, synthetic construct
  source 1..21: mol_type = other RNA
ctcccaaagtgctgaccagcc

SEQ ID NO: 3490 - RNA, 21 nt, synthetic construct
  source 1..21: mol_type = other RNA
ggccaccagttccacgtccac

SEQ ID NO: 3491 - RNA, 21 nt, synthetic construct
  source 1..21: mol_type = other RNA
tgagcaccacggccacgacac

SEQ ID NO: 3492 - RNA, 21 nt, synthetic construct
  source 1..21: mol_type = other RNA
ccagggactgcaactgccctt

SEQ ID NO: 3493 - RNA, 21 nt, synthetic construct
  source 1..21: mol_type = other RNA
cgccagagtgctgaccaccac

SEQ ID NO: 3494 - RNA, 21 nt, synthetic construct
  source 1..21: mol_type = other RNA
cagggacaacacccatcaccc

SEQ ID NO: 3495 - RNA, 21 nt, synthetic construct
  source 1..21: mol_type = other RNA
ctccaaagccacttcctcctc

SEQ ID NO: 3496 - RNA, 21 nt, synthetic construct
  source 1..21: mol_type = other RNA
ctccaccctgtggaccacgtg

SEQ ID NO: 3497 - RNA, 21 nt, synthetic construct
  source 1..21: mol_type = other RNA
cccagcacagaccaccacacc

SEQ ID NO: 3498 - RNA, 21 nt, synthetic construct
  source 1..21: mol_type = other RNA
ctcctctactccagagaccac

SEQ ID NO: 3499 - RNA, 21 nt, synthetic construct
  source 1..21: mol_type = other RNA
ctccacagtgctgaccaccac

SEQ ID NO: 3500 - RNA, 21 nt, synthetic construct
  source 1..21: mol_type = other RNA
ggccaccaattccacggccac

SEQ ID NO: 3501 - RNA, 21 nt, synthetic construct
  source 1..21: mol_type = other RNA
tggatccacggccaccctgtc

SEQ ID NO: 3502 - RNA, 21 nt, synthetic construct
  source 1..21: mol_type = other RNA
gagcactatagccaccgtgat

SEQ ID NO: 3503 - RNA, 21 nt, synthetic construct
  source 1..21: mol_type = other RNA
catggccactatgcccacagc

SEQ ID NO: 3504 - RNA, 21 nt, synthetic construct
  source 1..21: mol_type = other RNA
tgcctccacggttcccagctc

SEQ ID NO: 3505 - RNA, 21 nt, synthetic construct
  source 1..21: mol_type = other RNA
gccaaccttcagcgtgtccac

SEQ ID NO: 3506 - RNA, 21 nt, synthetic construct
  source 1..21: mol_type = other RNA
tcctcctcagtcctcaccacc

SEQ ID NO: 3507 - RNA, 21 nt, synthetic construct
  source 1..21: mol_type = other RNA
tcccacttctctactccctgc

SEQ ID NO: 3508 - RNA, 21 nt, synthetic construct
  source 1..21: mol_type = other RNA
gcatttggacagtttttctcg

SEQ ID NO: 3509 - RNA, 21 nt, synthetic construct
  source 1..21: mol_type = other RNA
gaagtcatctacaataagacc

SEQ ID NO: 3510 - RNA, 21 nt, synthetic construct
  source 1..21: mol_type = other RNA
ctgccatttctacgcagtgtg

SEQ ID NO: 3511 - RNA, 21 nt, synthetic construct
  source 1..21: mol_type = other RNA
cactgtgacattgaccgcttc

SEQ ID NO: 3512 - RNA, 21 nt, synthetic construct
  source 1..21: mol_type = other RNA
tgtgacaatgccatccctctc

SEQ ID NO: 3513 - RNA, 21 nt, synthetic construct
  source 1..21: mol_type = other RNA
accctggagaactgcacggtg

SEQ ID NO: 3514 - RNA, 21 nt, synthetic construct
  source 1..21: mol_type = other RNA
gtgggtgacaaccgtgtcgtc

SEQ ID NO: 3515 - RNA, 21 nt, synthetic construct
  source 1..21: mol_type = other RNA
gacccaaagcctgtggccaac

SEQ ID NO: 3516 - RNA, 21 nt, synthetic construct
  source 1..21: mol_type = other RNA
ctgcgtgaacaagcacctgcc

SEQ ID NO: 3517 - RNA, 21 nt, synthetic construct
  source 1..21: mol_type = other RNA
tcaaagtgtcggacccgagcc

SEQ ID NO: 3518 - RNA, 21 nt, synthetic construct
  source 1..21: mol_type = other RNA
cctgtgacttccactatgagt

SEQ ID NO: 3519 - RNA, 21 nt, synthetic construct
  source 1..21: mol_type = other RNA
gagtgcatctgcagcatgtgg

SEQ ID NO: 3520 - RNA, 21 nt, synthetic construct
  source 1..21: mol_type = other RNA
cccactattccacctttgacg

SEQ ID NO: 3521 - RNA, 21 nt, synthetic construct
  source 1..21: mol_type = other RNA
acctatgtcctcatgagagag

SEQ ID NO: 3522 - RNA, 21 nt, synthetic construct
  source 1..21: mol_type = other RNA
cacgctttgggaatctcagcc

SEQ ID NO: 3523 - RNA, 21 nt, synthetic construct
  source 1..21: mol_type = other RNA
ctggacaaccactactgcacg

SEQ ID NO: 3524 - RNA, 21 nt, synthetic construct
  source 1..21: mol_type = other RNA
ctcagcatccactacaagtcc

SEQ ID NO: 3525 - RNA, 21 nt, synthetic construct
  source 1..21: mol_type = other RNA
gtcctcactgtcaccatggtg

SEQ ID NO: 3526 - RNA, 21 nt, synthetic construct
  source 1..21: mol_type = other RNA
cctgatcctgtttgaccaaat

SEQ ID NO: 3527 - RNA, 21 nt, synthetic construct
  source 1..21: mol_type = other RNA
agcggtttcagcaagaacggc

SEQ ID NO: 3528 - RNA, 21 nt, synthetic construct
  source 1..21: mol_type = other RNA
cgtgtggacattcctgccctg

SEQ ID NO: 3529 - RNA, 21 nt, synthetic construct
  source 1..21: mol_type = other RNA
gtgagcgtcaccttcaatggc

SEQ ID NO: 3530 - RNA, 21 nt, synthetic construct
  source 1..21: mol_type = other RNA
agcctcttccacaacaacacc

SEQ ID NO: 3531 - RNA, 21 nt, synthetic construct
  source 1..21: mol_type = other RNA
tgcaccaacaaccagagggac

SEQ ID NO: 3532 - RNA, 21 nt, synthetic construct
  source 1..21: mol_type = other RNA
tgtctccagcgggacggaacc

SEQ ID NO: 3533 - RNA, 21 nt, synthetic construct
  source 1..21: mol_type = other RNA
cgccagttgcaaggacatggc

SEQ ID NO: 3534 - RNA, 21 nt, synthetic construct
  source 1..21: mol_type = other RNA
cgacagcagaaaggatggctg

SEQ ID NO: 3535 - RNA, 21 nt, synthetic construct
  source 1..21: mol_type = other RNA
ccgctctgtgatctgatgctg

SEQ ID NO: 3536 - RNA, 21 nt, synthetic construct
  source 1..21: mol_type = other RNA
caggtctttgctgagtgccac

SEQ ID NO: 3537 - RNA, 21 nt, synthetic construct
  source 1..21: mol_type = other RNA
gggcccattcttcaacgcctg

SEQ ID NO: 3538 - RNA, 21 nt, synthetic construct
  source 1..21: mol_type = other RNA
gaggcttacgcagagctctgc

SEQ ID NO: 3539 - RNA, 21 nt, synthetic construct
  source 1..21: mol_type = other RNA
agtgtgcagtgactggcgagg

SEQ ID NO: 3540 - RNA, 21 nt, synthetic construct
  source 1..21: mol_type = other RNA
ccaccaaagtgtacaagccat

SEQ ID NO: 3541 - RNA, 21 nt, synthetic construct
  source 1..21: mol_type = other RNA
ctgcaactctaggaaccagag

SEQ ID NO: 3542 - RNA, 21 nt, synthetic construct
  source 1..21: mol_type = other RNA
cagatcctcttcaacgcacac

SEQ ID NO: 3543 - RNA, 21 nt, synthetic construct
  source 1..21: mol_type = other RNA
gggcatctgcgtgcaggcctg

SEQ ID NO: 3544 - RNA, 21 nt, synthetic construct
  source 1..21: mol_type = other RNA
cgatgggtttcctaaatttcc

SEQ ID NO: 3545 - RNA, 21 nt, synthetic construct
  source 1..21: mol_type = other RNA
ggtcagcaactgccagtcctg

SEQ ID NO: 3546 - RNA, 21 nt, synthetic construct
  source 1..21: mol_type = other RNA
gagggttcagtgtcggtgcag

SEQ ID NO: 3547 - RNA, 21 nt, synthetic construct
  source 1..21: mol_type = other RNA
cggcttcgtaaccgtgaccag

SEQ ID NO: 3548 - RNA, 21 nt, synthetic construct
  source 1..21: mol_type = other RNA
cgtgtgcaacacaaccacctg

SEQ ID NO: 3549 - RNA, 21 nt, synthetic construct
  source 1..21: mol_type = other RNA
caggagtccatctgcacccag

SEQ ID NO: 3550 - RNA, 21 nt, synthetic construct
  source 1..21: mol_type = other RNA
ctgtcccaccttccgctgcag

SEQ ID NO: 3551 - RNA, 21 nt, synthetic construct
  source 1..21: mol_type = other RNA
tcagctgtgttcgtacaatgg

SEQ ID NO: 3552 - RNA, 21 nt, synthetic construct
  source 1..21: mol_type = other RNA
ttggtgcaaccttcccaggcg

SEQ ID NO: 3553 - RNA, 21 nt, synthetic construct
  source 1..21: mol_type = other RNA
tccctgccacatgtgtacctg

SEQ ID NO: 3554 - RNA, 21 nt, synthetic construct
  source 1..21: mol_type = other RNA
acggtgcaatgtcaggaggat

SEQ ID NO: 3555 - RNA, 21 nt, synthetic construct
  source 1..21: mol_type = other RNA
ctgcaacaatactacctgtcc

SEQ ID NO: 3556 - RNA, 21 nt, synthetic construct
  source 1..21: mol_type = other RNA
gggctttgagtacaagagagt

SEQ ID NO: 3557 - RNA, 21 nt, synthetic construct
  source 1..21: mol_type = other RNA
gtccagctgaatgaaacctgg

SEQ ID NO: 3558 - RNA, 21 nt, synthetic construct
  source 1..21: mol_type = other RNA
caacagccatgtggacaactg

SEQ ID NO: 3559 - RNA, 21 nt, synthetic construct
  source 1..21: mol_type = other RNA
ccgtgtacctctgtgaggctg

SEQ ID NO: 3560 - RNA, 21 nt, synthetic construct
  source 1..21: mol_type = other RNA
ggtggagtccatttgctgacc

SEQ ID NO: 3561 - RNA, 21 nt, synthetic construct
  source 1..21: mol_type = other RNA
ctgcccagatgtgtccagctg

SEQ ID NO: 3562 - RNA, 21 nt, synthetic construct
  source 1..21: mol_type = other RNA
gctgctactcctgtgaggagg

SEQ ID NO: 3563 - RNA, 21 nt, synthetic construct
  source 1..21: mol_type = other RNA
tcctgtcaagtccgcatcaac

SEQ ID NO: 3564 - RNA, 21 nt, synthetic construct
  source 1..21: mol_type = other RNA
gaccatcctgtggcaccaggg

SEQ ID NO: 3565 - RNA, 21 nt, synthetic construct
  source 1..21: mol_type = other RNA
cgtccaagtactcagcagagg

SEQ ID NO: 3566 - RNA, 21 nt, synthetic construct
  source 1..21: mol_type = other RNA
atgcagcaccagtgcacctgc

SEQ ID NO: 3567 - RNA, 21 nt, synthetic construct
  source 1..21: mol_type = other RNA
gcccttgcactgtcctaacgg

SEQ ID NO: 3568 - RNA, 21 nt, synthetic construct
  source 1..21: mol_type = other RNA
ctgcacacctacacccacgtg

SEQ ID NO: 3569 - RNA, 21 nt, synthetic construct
  source 1..21: mol_type = other RNA
gcacgcccttctgtgtccctg

SEQ ID NO: 3570 - RNA, 21 nt, synthetic construct
  source 1..21: mol_type = other RNA
catgctctgtccacctggagc

SEQ ID NO: 3571 - RNA, 21 nt, synthetic construct
  source 1..21: mol_type = other RNA
gcattgtctgatcatgaaaac

SEQ ID NO: 3572 - RNA, 21 nt, synthetic construct
  source 1..21: mol_type = other RNA
ggcgccactcaggagtcctac

SEQ ID NO: 3573 - RNA, 21 nt, synthetic construct
  source 1..21: mol_type = other RNA
ctccctgatgtcactgggacg

SEQ ID NO: 3574 - RNA, 21 nt, synthetic construct
  source 1..21: mol_type = other RNA
ctggaacaaactaagcatgtg

SEQ ID NO: 3575 - RNA, 21 nt, synthetic construct
  source 1..21: mol_type = other RNA
gcacggattccagctggccac

SEQ ID NO: 3576 - RNA, 21 nt, synthetic construct
  source 1..21: mol_type = other RNA
gacaggctggtccaggcaagg

SEQ ID NO: 3577 - RNA, 21 nt, synthetic construct
  source 1..21: mol_type = other RNA
gctgccaggaagctgcgacag

SEQ ID NO: 3578 - RNA, 21 nt, synthetic construct
  source 1..21: mol_type = other RNA
gcagggtaactcagggctgag

SEQ ID NO: 3579 - RNA, 21 nt, synthetic construct
  source 1..21: mol_type = other RNA
gcaacggccaggtcagagagg

SEQ ID NO: 3580 - RNA, 21 nt, synthetic construct
  source 1..21: mol_type = other RNA
agcccagttttgcaaataaac

SEQ ID NO: 3581 - RNA, 23 nt, synthetic construct
  source 1..23: mol_type = other RNA
gagcatggccgccagagccaaca

SEQ ID NO: 3582 - RNA, 23 nt, synthetic construct
  source 1..23: mol_type = other RNA
gtgtgccctgcattctcccagct

SEQ ID NO: 3583 - RNA, 23 nt, synthetic construct
  source 1..23: mol_type = other RNA
ggtggaacaaagctcacgcgccg

SEQ ID NO: 3584 - RNA, 23 nt, synthetic construct
  source 1..23: mol_type = other RNA
caggtgctgcacacccgcccatt

SEQ ID NO: 3585 - RNA, 23 nt, synthetic construct
  source 1..23: mol_type = other RNA
ccgtcgaaggtcttgtagtggaa

SEQ ID NO: 3586 - RNA, 23 nt, synthetic construct
  source 1..23: mol_type = other RNA
gagaacacgtagttgcaaaggcc

SEQ ID NO: 3587 - RNA, 23 nt, synthetic construct
  source 1..23: mol_type = other RNA
ggccttgatgacaacacgggtga

SEQ ID NO: 3588 - RNA, 23 nt, synthetic construct
  source 1..23: mol_type = other RNA
cccattgatgaggacggagccgt

SEQ ID NO: 3589 - RNA, 23 nt, synthetic construct
  source 1..23: mol_type = other RNA
ccagtgcggctgtaaggcagctc

SEQ ID NO: 3590 - RNA, 23 nt, synthetic construct
  source 1..23: mol_type = other RNA
gatgctgaccttgatgtagtccc

SEQ ID NO: 3591 - RNA, 23 nt, synthetic construct
  source 1..23: mol_type = other RNA
ccgttccacaggaatgtcagcac

SEQ ID NO: 3592 - RNA, 23 nt, synthetic construct
  source 1..23: mol_type = other RNA
gttggcgtatttgggatccagct

SEQ ID NO: 3593 - RNA, 23 nt, synthetic construct
  source 1..23: mol_type = other RNA
ggcatagaactcgttgaaggccg

SEQ ID NO: 3594 - RNA, 23 nt, synthetic construct
  source 1..23: mol_type = other RNA
cccatccaacttctgcaggttcc

SEQ ID NO: 3595 - RNA, 23 nt, synthetic construct
  source 1..23: mol_type = other RNA
gatgccctcctcgtccgtgcagt

SEQ ID NO: 3596 - RNA, 23 nt, synthetic construct
  source 1..23: mol_type = other RNA
cagtgcgtggcactccgcaaagg

SEQ ID NO: 3597 - RNA, 23 nt, synthetic construct
  source 1..23: mol_type = other RNA
ggccaggtacgcagtgctgtcca

SEQ ID NO: 3598 - RNA, 23 nt, synthetic construct
  source 1..23: mol_type = other RNA
cagagctcagggcacctccagtt

SEQ ID NO: 3599 - RNA, 23 nt, synthetic construct
  source 1..23: mol_type = other RNA
ctcctggtgctgcatgttgaggg

SEQ ID NO: 3600 - RNA, 23 nt, synthetic construct
  source 1..23: mol_type = other RNA
gagcaggtgtccgtgcagggtga

SEQ ID NO: 3601 - RNA, 23 nt, synthetic construct
  source 1..23: mol_type = other RNA
cagccgtccacacagtggtcctc

SEQ ID NO: 3602 - RNA, 23 nt, synthetic construct
  source 1..23: mol_type = other RNA
gagtgcgtgatgtcatccagcac

SEQ ID NO: 3603 - RNA, 23 nt, synthetic construct
  source 1..23: mol_type = other RNA
ctgcaggtggtgttgaaggaggt

SEQ ID NO: 3604 - RNA, 23 nt, synthetic construct
  source 1..23: mol_type = other RNA
caggtcctggcactgccatagcc

SEQ ID NO: 3605 - RNA, 23 nt, synthetic construct
  source 1..23: mol_type = other RNA
gtagagtttctcatcataggtgg

SEQ ID NO: 3606 - RNA, 23 nt, synthetic construct
  source 1..23: mol_type = other RNA
cagcacggtgaagctgctgtcgg

SEQ ID NO: 3607 - RNA, 23 nt, synthetic construct
  source 1..23: mol_type = other RNA
gcgtgtagatggagttgaggaac

SEQ ID NO: 3608 - RNA, 23 nt, synthetic construct
  source 1..23: mol_type = other RNA
caccacgatgaagaagctcgagg

SEQ ID NO: 3609 - RNA, 23 nt, synthetic construct
  source 1..23: mol_type = other RNA
acaaacacctgcatgagtggcac

SEQ ID NO: 3610 - RNA, 23 nt, synthetic construct
  source 1..23: mol_type = other RNA
ctggttctggttgaagttcccac

SEQ ID NO: 3611 - RNA, 23 nt, synthetic construct
  source 1..23: mol_type = other RNA
ctgagggccgtgaagtcgtcagc

SEQ ID NO: 3612 - RNA, 23 nt, synthetic construct
  source 1..23: mol_type = other RNA
ggtcctcaaagctgttcctggca

SEQ ID NO: 3613 - RNA, 23 nt, synthetic construct
  source 1..23: mol_type = other RNA
ggcgtagttctcattctccacac

SEQ ID NO: 3614 - RNA, 23 nt, synthetic construct
  source 1..23: mol_type = other RNA
cagcgcgagaaggcactgttggg

SEQ ID NO: 3615 - RNA, 23 nt, synthetic construct
  source 1..23: mol_type = other RNA
ctccgctcacagttgcaggtgtc

SEQ ID NO: 3616 - RNA, 23 nt, synthetic construct
  source 1..23: mol_type = other RNA
cacaggcgtgcacataggaggac

SEQ ID NO: 3617 - RNA, 23 nt, synthetic construct
  source 1..23: mol_type = other RNA
ccagtcgctgagctgtacgccct

SEQ ID NO: 3618 - RNA, 23 nt, synthetic construct
  source 1..23: mol_type = other RNA
gcagttctgcatgtacttggtgc

SEQ ID NO: 3619 - RNA, 23 nt, synthetic construct
  source 1..23: mol_type = other RNA
ggcatccaccacgtaggcgtagc

SEQ ID NO: 3620 - RNA, 23 nt, synthetic construct
  source 1..23: mol_type = other RNA
caggcacgaaggaaacgctgcag

SEQ ID NO: 3621 - RNA, 23 nt, synthetic construct
  source 1..23: mol_type = other RNA
ccgcgtcattgaggaaggtgccc

SEQ ID NO: 3622 - RNA, 23 nt, synthetic construct
  source 1..23: mol_type = other RNA
cgtcgtgcaccacctctccagga

SEQ ID NO: 3623 - RNA, 23 nt, synthetic construct
  source 1..23: mol_type = other RNA
cacccgtacatgaacacacggcg

SEQ ID NO: 3624 - RNA, 23 nt, synthetic construct
  source 1..23: mol_type = other RNA
ctgtgcttttctgcagagaggct

SEQ ID NO: 3625 - RNA, 23 nt, synthetic construct
  source 1..23: mol_type = other RNA
gccgagctgttgctgcagtccag

SEQ ID NO: 3626 - RNA, 23 nt, synthetic construct
  source 1..23: mol_type = other RNA
acgcagtgtgtgctgaaacagcc

SEQ ID NO: 3627 - RNA, 23 nt, synthetic construct
  source 1..23: mol_type = other RNA
cagtcctcctcggcaatgcagcc

SEQ ID NO: 3628 - RNA, 23 nt, synthetic construct
  source 1..23: mol_type = other RNA
gtctctccaggcttgtaggtggc

SEQ ID NO: 3629 - RNA, 23 nt, synthetic construct
  source 1..23: mol_type = other RNA
caggtgcaggtgttgcagtcgac

SEQ ID NO: 3630 - RNA, 23 nt, synthetic construct
  source 1..23: mol_type = other RNA
ctgcactcccacctccggttcct

SEQ ID NO: 3631 - RNA, 23 nt, synthetic construct
  source 1..23: mol_type = other RNA
ccttcaaagctgtagcgatcgcc

SEQ ID NO: 3632 - RNA, 23 nt, synthetic construct
  source 1..23: mol_type = other RNA
gggccaagatgtactcgcagctg

SEQ ID NO: 3633 - RNA, 23 nt, synthetic construct
  source 1..23: mol_type = other RNA
ctccacgaagagcttgatggcct

SEQ ID NO: 3634 - RNA, 23 nt, synthetic construct
  source 1..23: mol_type = other RNA
ctcttggaggatcagctcgtagc

SEQ ID NO: 3635 - RNA, 23 nt, synthetic construct
  source 1..23: mol_type = other RNA
ctcgccaccgccttaaaggtccc

SEQ ID NO: 3636 - RNA, 23 nt, synthetic construct
  source 1..23: mol_type = other RNA
atgtagcgtatcttgtagggtgg

SEQ ID NO: 3637 - RNA, 23 nt, synthetic construct
  source 1..23: mol_type = other RNA
gtgggtctcgatgaccaggaaga

SEQ ID NO: 3638 - RNA, 23 nt, synthetic construct
  source 1..23: mol_type = other RNA
gcagtcggatgaacacgctggtc

SEQ ID NO: 3639 - RNA, 23 nt, synthetic construct
  source 1..23: mol_type = other RNA
gaccctgcccttgtagtcctggt

SEQ ID NO: 3640 - RNA, 23 nt, synthetic construct
  source 1..23: mol_type = other RNA
ggcattgtcgtcgaagttcccgc

SEQ ID NO: 3641 - RNA, 23 nt, synthetic construct
  source 1..23: mol_type = other RNA
ctacgcgtggcaaagtcattgat

SEQ ID NO: 3642 - RNA, 23 nt, synthetic construct
  source 1..23: mol_type = other RNA
gctgttcccaaactccagtgcgt

SEQ ID NO: 3643 - RNA, 23 nt, synthetic construct
  source 1..23: mol_type = other RNA
atgctgcactgcttctgggccca

SEQ ID NO: 3644 - RNA, 23 nt, synthetic construct
  source 1..23: mol_type = other RNA
gcgtcgttcacgcaggcctcgta

SEQ ID NO: 3645 - RNA, 23 nt, synthetic construct
  source 1..23: mol_type = other RNA
ccgtgcagaaacactcgcagtcg

SEQ ID NO: 3646 - RNA, 23 nt, synthetic construct
  source 1..23: mol_type = other RNA
gagtccgccaggacacacacagg

SEQ ID NO: 3647 - RNA, 23 nt, synthetic construct
  source 1..23: mol_type = other RNA
ggttgtagaagtcacagaacaag

SEQ ID NO: 3648 - RNA, 23 nt, synthetic construct
  source 1..23: mol_type = other RNA
gggctggtagtgccactcacagc

SEQ ID NO: 3649 - RNA, 23 nt, synthetic construct
  source 1..23: mol_type = other RNA
gtgggcacttcgggtagcagcct

SEQ ID NO: 3650 - RNA, 23 nt, synthetic construct
  source 1..23: mol_type = other RNA
ggtcctcattgaagaagggctgg

SEQ ID NO: 3651 - RNA, 23 nt, synthetic construct
  source 1..23: mol_type = other RNA
gccacactgggccacgcacttca

SEQ ID NO: 3652 - RNA, 23 nt, synthetic construct
  source 1..23: mol_type = other RNA
gggacccttgcaccgacgtcata

SEQ ID NO: 3653 - RNA, 23 nt, synthetic construct
  source 1..23: mol_type = other RNA
ggtgtgcagttacagctctggca

SEQ ID NO: 3654 - RNA, 23 nt, synthetic construct
  source 1..23: mol_type = other RNA
ctcaaggctgtgagcgcactgga

SEQ ID NO: 3655 - RNA, 23 nt, synthetic construct
  source 1..23: mol_type = other RNA
gtcctgtcctcataggtgcaggt

SEQ ID NO: 3656 - RNA, 23 nt, synthetic construct
  source 1..23: mol_type = other RNA
ggtgttgtagatgacgtcctggt

SEQ ID NO: 3657 - RNA, 23 nt, synthetic construct
  source 1..23: mol_type = other RNA
cagatggcgatcaagcaggcgcc

SEQ ID NO: 3658 - RNA, 23 nt, synthetic construct
  source 1..23: mol_type = other RNA
cacagccttcctgatgatggtgc

SEQ ID NO: 3659 - RNA, 23 nt, synthetic construct
  source 1..23: mol_type = other RNA
gtgaaggtgaatggcgttgtggc

SEQ ID NO: 3660 - RNA, 23 nt, synthetic construct
  source 1..23: mol_type = other RNA
ctcgcggacacacacggtggaga

SEQ ID NO: 3661 - RNA, 23 nt, synthetic construct
  source 1..23: mol_type = other RNA
gtgcccattgtaccagctggacc

SEQ ID NO: 3662 - RNA, 23 nt, synthetic construct
  source 1..23: mol_type = other RNA
cagggcatacctggtaccctctc

SEQ ID NO: 3663 - RNA, 23 nt, synthetic construct
  source 1..23: mol_type = other RNA
ccggcactcgatgtcagccagca

SEQ ID NO: 3664 - RNA, 23 nt, synthetic construct
  source 1..23: mol_type = other RNA
ctccagcggcatgtcgggaagct

SEQ ID NO: 3665 - RNA, 23 nt, synthetic construct
  source 1..23: mol_type = other RNA
catgcggtcacagtccacctgct

SEQ ID NO: 3666 - RNA, 23 nt, synthetic construct
  source 1..23: mol_type = other RNA
ggactctgttggctgttggcgca

SEQ ID NO: 3667 - RNA, 23 nt, synthetic construct
  source 1..23: mol_type = other RNA
gcagctcgtagtcgtgacagagc

SEQ ID NO: 3668 - RNA, 23 nt, synthetic construct
  source 1..23: mol_type = other RNA
ggcacgtattcgcagcagagaac

SEQ ID NO: 3669 - RNA, 23 nt, synthetic construct
  source 1..23: mol_type = other RNA
gtaggcacagcaggctccgtgct

SEQ ID NO: 3670 - RNA, 23 nt, synthetic construct
  source 1..23: mol_type = other RNA
ctggacccagtctgcgaggtgag

SEQ ID NO: 3671 - RNA, 23 nt, synthetic construct
  source 1..23: mol_type = other RNA
gtcctcatcaaaccactctgtcc

SEQ ID NO: 3672 - RNA, 23 nt, synthetic construct
  source 1..23: mol_type = other RNA
cttatcgtaggactcaacgtccc

SEQ ID NO: 3673 - RNA, 23 nt, synthetic construct
  source 1..23: mol_type = other RNA
cataagtgccctccagcggccct

SEQ ID NO: 3674 - RNA, 23 nt, synthetic construct
  source 1..23: mol_type = other RNA
gcactctatgtccttaggctgct

SEQ ID NO: 3675 - RNA, 23 nt, synthetic construct
  source 1..23: mol_type = other RNA
cacctgtgccagggtccagttgg

SEQ ID NO: 3676 - RNA, 23 nt, synthetic construct
  source 1..23: mol_type = other RNA
gaagtggacgtcacagtgcacct

SEQ ID NO: 3677 - RNA, 23 nt, synthetic construct
  source 1..23: mol_type = other RNA
cagtggtcgtcactgcagcagag

SEQ ID NO: 3678 - RNA, 23 nt, synthetic construct
  source 1..23: mol_type = other RNA
ccgtctccagctctgtggtcggt

SEQ ID NO: 3679 - RNA, 23 nt, synthetic construct
  source 1..23: mol_type = other RNA
ctgcggcgttgagaacagggcct

SEQ ID NO: 3680 - RNA, 23 nt, synthetic construct
  source 1..23: mol_type = other RNA
gatgtcagtccttctgagagggt

SEQ ID NO: 3681 - RNA, 23 nt, synthetic construct
  source 1..23: mol_type = other RNA
ccaagggtgcttgtgtatctggg

SEQ ID NO: 3682 - RNA, 23 nt, synthetic construct
  source 1..23: mol_type = other RNA
ggacagtgggttctgtggagcct

SEQ ID NO: 3683 - RNA, 23 nt, synthetic construct
  source 1..23: mol_type = other RNA
gctgagcgtgttggaagggtgga

SEQ ID NO: 3684 - RNA, 23 nt, synthetic construct
  source 1..23: mol_type = other RNA
gtcagcggctctttggaagcggt

SEQ ID NO: 3685 - RNA, 23 nt, synthetic construct
  source 1..23: mol_type = other RNA
ctcgctcgtgagtgttggcgcca

SEQ ID NO: 3686 - RNA, 23 nt, synthetic construct
  source 1..23: mol_type = other RNA
gtctcggcctgagaggtggacag

SEQ ID NO: 3687 - RNA, 23 nt, synthetic construct
  source 1..23: mol_type = other RNA
ctcattgtcgtctctgtcctggg

SEQ ID NO: 3688 - RNA, 23 nt, synthetic construct
  source 1..23: mol_type = other RNA
ctggtggtggtgttagtcaaggg

SEQ ID NO: 3689 - RNA, 23 nt, synthetic construct
  source 1..23: mol_type = other RNA
cactcacacttcggttgacagcg

SEQ ID NO: 3690 - RNA, 23 nt, synthetic construct
  source 1..23: mol_type = other RNA
aagtccacgtcaaaccactctgt

SEQ ID NO: 3691 - RNA, 23 nt, synthetic construct
  source 1..23: mol_type = other RNA
ctgatgttttcaaaagtttccat

SEQ ID NO: 3692 - RNA, 23 nt, synthetic construct
  source 1..23: mol_type = other RNA
gcactctatgctctttggtgccc

SEQ ID NO: 3693 - RNA, 23 nt, synthetic construct
  source 1..23: mol_type = other RNA
acctggtcgatgcttacctcggg

SEQ ID NO: 3694 - RNA, 23 nt, synthetic construct
  source 1..23: mol_type = other RNA
cgtctccaggctgcaggtcagca

SEQ ID NO: 3695 - RNA, 23 nt, synthetic construct
  source 1..23: mol_type = other RNA
gtctggtcttcgttcttgcaggt

SEQ ID NO: 3696 - RNA, 23 nt, synthetic construct
  source 1..23: mol_type = other RNA
acgcacgttgtagttgaagcaca

SEQ ID NO: 3697 - RNA, 23 nt, synthetic construct
  source 1..23: mol_type = other RNA
gggagctgttctcagggtggagg

SEQ ID NO: 3698 - RNA, 23 nt, synthetic construct
  source 1..23: mol_type = other RNA
gtggtggtcagcactttgggagg

SEQ ID NO: 3699 - RNA, 23 nt, synthetic construct
  source 1..23: mol_type = other RNA
gagggagtggctttggagctggt

SEQ ID NO: 3700 - RNA, 23 nt, synthetic construct
  source 1..23: mol_type = other RNA
cggttgcagtccctggactggag

SEQ ID NO: 3701 - RNA, 23 nt, synthetic construct
  source 1..23: mol_type = other RNA
gtggctgtgcttctcagtgctgg

SEQ ID NO: 3702 - RNA, 23 nt, synthetic construct
  source 1..23: mol_type = other RNA
ggatgggtgtaacgctggtagct

SEQ ID NO: 3703 - RNA, 23 nt, synthetic construct
  source 1..23: mol_type = other RNA
caggtggtgcccagggaggaaga

SEQ ID NO: 3704 - RNA, 23 nt, synthetic construct
  source 1..23: mol_type = other RNA
ggtgtggtggtctgtgataggcg

SEQ ID NO: 3705 - RNA, 23 nt, synthetic construct
  source 1..23: mol_type = other RNA
gtgtggctgtggacatggtggcc

SEQ ID NO: 3706 - RNA, 23 nt, synthetic construct
  source 1..23: mol_type = other RNA
ggcagtctctggagtggaggagg

SEQ ID NO: 3707 - RNA, 23 nt, synthetic construct
  source 1..23: mol_type = other RNA
gtggcggtaagcactgtggaggt

SEQ ID NO: 3708 - RNA, 23 nt, synthetic construct
  source 1..23: mol_type = other RNA
ccgtggttgtggtagttggcact

SEQ ID NO: 3709 - RNA, 23 nt, synthetic construct
  source 1..23: mol_type = other RNA
gttgtgctgatccacactggagg

SEQ ID NO: 3710 - RNA, 23 nt, synthetic construct
  source 1..23: mol_type = other RNA
gtggagcctctggttgtgggtgt

SEQ ID NO: 3711 - RNA, 23 nt, synthetic construct
  source 1..23: mol_type = other RNA
gtggtggtcagcactgtggcggt

SEQ ID NO: 3712 - RNA, 23 nt, synthetic construct
  source 1..23: mol_type = other RNA
ctggtctgtgtgctagaggaggg

SEQ ID NO: 3713 - RNA, 23 nt, synthetic construct
  source 1..23: mol_type = other RNA
gtggccgtgatcgtagtggccgt

SEQ ID NO: 3714 - RNA, 23 nt, synthetic construct
  source 1..23: mol_type = other RNA
gttgtcccaggagttgaggaggg

SEQ ID NO: 3715 - RNA, 23 nt, synthetic construct
  source 1..23: mol_type = other RNA
gagggagtcactgtgttgctggt

SEQ ID NO: 3716 - RNA, 23 nt, synthetic construct
  source 1..23: mol_type = other RNA
gtgtgggtggtccctagggcaga

SEQ ID NO: 3717 - RNA, 23 nt, synthetic construct
  source 1..23: mol_type = other RNA
gtggccatggtgttcggcactgg

SEQ ID NO: 3718 - RNA, 23 nt, synthetic construct
  source 1..23: mol_type = other RNA
gaggtggccgaagtccaggctgt

SEQ ID NO: 3719 - RNA, 23 nt, synthetic construct
  source 1..23: mol_type = other RNA
ggaaggctctgtgatgtgggtgg

SEQ ID NO: 3720 - RNA, 23 nt, synthetic construct
  source 1..23: mol_type = other RNA
gctagggtgtgggaagtcaccgt

SEQ ID NO: 3721 - RNA, 23 nt, synthetic construct
  source 1..23: mol_type = other RNA
gctgggtggtaccggtggttgct

SEQ ID NO: 3722 - RNA, 23 nt, synthetic construct
  source 1..23: mol_type = other RNA
ggctggaaagggctggagtcgag

SEQ ID NO: 3723 - RNA, 23 nt, synthetic construct
  source 1..23: mol_type = other RNA
gactcggtggttctgctgctagg

SEQ ID NO: 3724 - RNA, 23 nt, synthetic construct
  source 1..23: mol_type = other RNA
gaggtgcgggtcttgctgggtgt

SEQ ID NO: 3725 - RNA, 23 nt, synthetic construct
  source 1..23: mol_type = other RNA
cacagcccatggtcaccaccgtg

SEQ ID NO: 3726 - RNA, 23 nt, synthetic construct
  source 1..23: mol_type = other RNA
gggtagctgtagtccagccactc

SEQ ID NO: 3727 - RNA, 23 nt, synthetic construct
  source 1..23: mol_type = other RNA
ggatgttggagtaggtgtcaaag

SEQ ID NO: 3728 - RNA, 23 nt, synthetic construct
  source 1..23: mol_type = other RNA
gcattccacgacctggcccaact

SEQ ID NO: 3729 - RNA, 23 nt, synthetic construct
  source 1..23: mol_type = other RNA
cagaccaggccaaagtccaggct

SEQ ID NO: 3730 - RNA, 23 nt, synthetic construct
  source 1..23: mol_type = other RNA
gatttcatagttgaagcacatct

SEQ ID NO: 3731 - RNA, 23 nt, synthetic construct
  source 1..23: mol_type = other RNA
ccgtagttgcagcagaacacacg

SEQ ID NO: 3732 - RNA, 23 nt, synthetic construct
  source 1..23: mol_type = other RNA
gagggcatggccgtagagctggt

SEQ ID NO: 3733 - RNA, 23 nt, synthetic construct
  source 1..23: mol_type = other RNA
cagtggactcagtcgtagtggct

SEQ ID NO: 3734 - RNA, 23 nt, synthetic construct
  source 1..23: mol_type = other RNA
gtcacggtggctgtagtgctcgg

SEQ ID NO: 3735 - RNA, 23 nt, synthetic construct
  source 1..23: mol_type = other RNA
cagcagttgcctgggtggaggag

SEQ ID NO: 3736 - RNA, 23 nt, synthetic construct
  source 1..23: mol_type = other RNA
gtgactgtgggtgtcgtggccgt

SEQ ID NO: 3737 - RNA, 23 nt, synthetic construct
  source 1..23: mol_type = other RNA
ggctgtaaagctggtagctgtgg

SEQ ID NO: 3738 - RNA, 23 nt, synthetic construct
  source 1..23: mol_type = other RNA
gacagtctctggagtggaggagg

SEQ ID NO: 3739 - RNA, 23 nt, synthetic construct
  source 1..23: mol_type = other RNA
ccgtggtggtaagcactgtggag

SEQ ID NO: 3740 - RNA, 23 nt, synthetic construct
  source 1..23: mol_type = other RNA
cagcactttggtagtgtgagctg

SEQ ID NO: 3741 - RNA, 23 nt, synthetic construct
  source 1..23: mol_type = other RNA
gtgaagcccgtggttgtggtagt

SEQ ID NO: 3742 - RNA, 23 nt, synthetic construct
  source 1..23: mol_type = other RNA
ctgatccacactggaagcgtgcg

SEQ ID NO: 3743 - RNA, 23 nt, synthetic construct
  source 1..23: mol_type = other RNA
gtggaacctctggttgtgggtgt

SEQ ID NO: 3744 - RNA, 23 nt, synthetic construct
  source 1..23: mol_type = other RNA
cagttgtggtggtggtggtcagc

SEQ ID NO: 3745 - RNA, 23 nt, synthetic construct
  source 1..23: mol_type = other RNA
gttgtccctggagttgaggaggg

SEQ ID NO: 3746 - RNA, 23 nt, synthetic construct
  source 1..23: mol_type = other RNA
gagggagtcactgtgctgctggt

SEQ ID NO: 3747 - RNA, 23 nt, synthetic construct
  source 1..23: mol_type = other RNA
gacagggatcgcccgtgtgtggt

SEQ ID NO: 3748 - RNA, 23 nt, synthetic construct
  source 1..23: mol_type = other RNA
ctggagtcgagtgctgggtggta

SEQ ID NO: 3749 - RNA, 23 nt, synthetic construct
  source 1..23: mol_type = other RNA
ctgctgctagggtgagggctgga

SEQ ID NO: 3750 - RNA, 23 nt, synthetic construct
  source 1..23: mol_type = other RNA
gtctgctctgtgaggatccaggt

SEQ ID NO: 3751 - RNA, 23 nt, synthetic construct
  source 1..23: mol_type = other RNA
gtgctggtcagcactttgggagg

SEQ ID NO: 3752 - RNA, 23 nt, synthetic construct
  source 1..23: mol_type = other RNA
gaggaagtggctttggaactggt

SEQ ID NO: 3753 - RNA, 23 nt, synthetic construct
  source 1..23: mol_type = other RNA
gaagggtggttgcagtccttgga

SEQ ID NO: 3754 - RNA, 23 nt, synthetic construct
  source 1..23: mol_type = other RNA
ggtggctgtgcttgtcagcactg

SEQ ID NO: 3755 - RNA, 23 nt, synthetic construct
  source 1..23: mol_type = other RNA
ggtgtaaagctggtagctgtgga

SEQ ID NO: 3756 - RNA, 23 nt, synthetic construct
  source 1..23: mol_type = other RNA
gtggtcccaagggtgaaggaggg

SEQ ID NO: 3757 - RNA, 23 nt, synthetic construct
  source 1..23: mol_type = other RNA
ggtgtggtggtctgttctgggag

SEQ ID NO: 3758 - RNA, 23 nt, synthetic construct
  source 1..23: mol_type = other RNA
gggtggattgtggacatggtggc

SEQ ID NO: 3759 - RNA, 23 nt, synthetic construct
  source 1..23: mol_type = other RNA
gtggacatggaactggtggccct

SEQ ID NO: 3760 - RNA, 23 nt, synthetic construct
  source 1..23: mol_type = other RNA
cagtggctgcagttgtagtggct

SEQ ID NO: 3761 - RNA, 23 nt, synthetic construct
  source 1..23: mol_type = other RNA
gtcacggtggctgtagtgctggg

SEQ ID NO: 3762 - RNA, 23 nt, synthetic construct
  source 1..23: mol_type = other RNA
gctggtcagcactttgagggtgc

SEQ ID NO: 3763 - RNA, 23 nt, synthetic construct
  source 1..23: mol_type = other RNA
ctggagctgatgactgtgggtgt

SEQ ID NO: 3764 - RNA, 23 nt, synthetic construct
  source 1..23: mol_type = other RNA
ctggactggaggagggagtggct

SEQ ID NO: 3765 - RNA, 23 nt, synthetic construct
  source 1..23: mol_type = other RNA
ggatggctgtaacgctggtagct

SEQ ID NO: 3766 - RNA, 23 nt, synthetic construct
  source 1..23: mol_type = other RNA
ggacagtctctggagtagaggag

SEQ ID NO: 3767 - RNA, 23 nt, synthetic construct
  source 1..23: mol_type = other RNA
ggcactttggtagtgtgagctgt

SEQ ID NO: 3768 - RNA, 23 nt, synthetic construct
  source 1..23: mol_type = other RNA
gtggctgtgatcgtagtggccgt

SEQ ID NO: 3769 - RNA, 23 nt, synthetic construct
  source 1..23: mol_type = other RNA
ccgtgtgtggtggccgtggtgtt

SEQ ID NO: 3770 - RNA, 23 nt, synthetic construct
  source 1..23: mol_type = other RNA
ctgtggctgtggtcctggaggtg

SEQ ID NO: 3771 - RNA, 23 nt, synthetic construct
  source 1..23: mol_type = other RNA
gcccgtggtcaccaccgtggtta

SEQ ID NO: 3772 - RNA, 23 nt, synthetic construct
  source 1..23: mol_type = other RNA
gagttgaggagggcgtggccgta

SEQ ID NO: 3773 - RNA, 23 nt, synthetic construct
  source 1..23: mol_type = other RNA
gtcagctttgtgaggatccaggt

SEQ ID NO: 3774 - RNA, 23 nt, synthetic construct
  source 1..23: mol_type = other RNA
gtggagccactggttgtgggtgt

SEQ ID NO: 3775 - RNA, 23 nt, synthetic construct
  source 1..23: mol_type = other RNA
gtggccgtggatccagtggatgc

SEQ ID NO: 3776 - RNA, 23 nt, synthetic construct
  source 1..23: mol_type = other RNA
ggctggtcagcactttgggaggg

SEQ ID NO: 3777 - RNA, 23 nt, synthetic construct
  source 1..23: mol_type = other RNA
gtggacgtggaactggtggccct

SEQ ID NO: 3778 - RNA, 23 nt, synthetic construct
  source 1..23: mol_type = other RNA
gtgtcgtggccgtggtgctcaca

SEQ ID NO: 3779 - RNA, 23 nt, synthetic construct
  source 1..23: mol_type = other RNA
aagggcagttgcagtccctggac

SEQ ID NO: 3780 - RNA, 23 nt, synthetic construct
  source 1..23: mol_type = other RNA
gtggtggtcagcactctggcggt

SEQ ID NO: 3781 - RNA, 23 nt, synthetic construct
  source 1..23: mol_type = other RNA
gggtgatgggtgttgtccctgga

SEQ ID NO: 3782 - RNA, 23 nt, synthetic construct
  source 1..23: mol_type = other RNA
gaggaggaagtggctttggagct

SEQ ID NO: 3783 - RNA, 23 nt, synthetic construct
  source 1..23: mol_type = other RNA
cacgtggtccacagggtggagga

SEQ ID NO: 3784 - RNA, 23 nt, synthetic construct
  source 1..23: mol_type = other RNA
ggtgtggtggtctgtgctgggac

SEQ ID NO: 3785 - RNA, 23 nt, synthetic construct
  source 1..23: mol_type = other RNA
gtggtctctggagtagaggaggt

SEQ ID NO: 3786 - RNA, 23 nt, synthetic construct
  source 1..23: mol_type = other RNA
gtggtggtcagcactgtggaggt

SEQ ID NO: 3787 - RNA, 23 nt, synthetic construct
  source 1..23: mol_type = other RNA
gtggccgtggaattggtggccct

SEQ ID NO: 3788 - RNA, 23 nt, synthetic construct
  source 1..23: mol_type = other RNA
gacagggtggccgtggatccagt

SEQ ID NO: 3789 - RNA, 23 nt, synthetic construct
  source 1..23: mol_type = other RNA
atcacggtggctatagtgctcgg

SEQ ID NO: 3790 - RNA, 23 nt, synthetic construct
  source 1..23: mol_type = other RNA
gctgtgggcatagtggccatggt

SEQ ID NO: 3791 - RNA, 23 nt, synthetic construct
  source 1..23: mol_type = other RNA
gagctgggaaccgtggaggcagt

SEQ ID NO: 3792 - RNA, 23 nt, synthetic construct
  source 1..23: mol_type = other RNA
gtggacacgctgaaggttggcag

SEQ ID NO: 3793 - RNA, 23 nt, synthetic construct
  source 1..23: mol_type = other RNA
ggtggtgaggactgaggaggaca

SEQ ID NO: 3794 - RNA, 23 nt, synthetic construct
  source 1..23: mol_type = other RNA
gcagggagtagagaagtgggagc

SEQ ID NO: 3795 - RNA, 23 nt, synthetic construct
  source 1..23: mol_type = other RNA
cgagaaaaactgtccaaatgccc

SEQ ID NO: 3796 - RNA, 23 nt, synthetic construct
  source 1..23: mol_type = other RNA
ggtcttattgtagatgacttccc

SEQ ID NO: 3797 - RNA, 23 nt, synthetic construct
  source 1..23: mol_type = other RNA
cacactgcgtagaaatggcagcc

SEQ ID NO: 3798 - RNA, 23 nt, synthetic construct
  source 1..23: mol_type = other RNA
gaagcggtcaatgtcacagtgct

SEQ ID NO: 3799 - RNA, 23 nt, synthetic construct
  source 1..23: mol_type = other RNA
gagagggatggcattgtcacagc

SEQ ID NO: 3800 - RNA, 23 nt, synthetic construct
  source 1..23: mol_type = other RNA
caccgtgcagttctccagggtcc

SEQ ID NO: 3801 - RNA, 23 nt, synthetic construct
  source 1..23: mol_type = other RNA
gacgacacggttgtcacccacgc

SEQ ID NO: 3802 - RNA, 23 nt, synthetic construct
  source 1..23: mol_type = other RNA
gttggccacaggctttgggtcca

SEQ ID NO: 3803 - RNA, 23 nt, synthetic construct
  source 1..23: mol_type = other RNA
ggcaggtgcttgttcacgcaggt

SEQ ID NO: 3804 - RNA, 23 nt, synthetic construct
  source 1..23: mol_type = other RNA
ggctcgggtccgacactttgatg

SEQ ID NO: 3805 - RNA, 23 nt, synthetic construct
  source 1..23: mol_type = other RNA
actcatagtggaagtcacagggc

SEQ ID NO: 3806 - RNA, 23 nt, synthetic construct
  source 1..23: mol_type = other RNA
ccacatgctgcagatgcactcgc

SEQ ID NO: 3807 - RNA, 23 nt, synthetic construct
  source 1..23: mol_type = other RNA
cgtcaaaggtggaatagtgggag

SEQ ID NO: 3808 - RNA, 23 nt, synthetic construct
  source 1..23: mol_type = other RNA
ctctctcatgaggacataggtgc

SEQ ID NO: 3809 - RNA, 23 nt, synthetic construct
  source 1..23: mol_type = other RNA
ggctgagattcccaaagcgtgca

SEQ ID NO: 3810 - RNA, 23 nt, synthetic construct
  source 1..23: mol_type = other RNA
cgtgcagtagtggttgtccaggt

SEQ ID NO: 3811 - RNA, 23 nt, synthetic construct
  source 1..23: mol_type = other RNA
ggacttgtagtggatgctgaggg

SEQ ID NO: 3812 - RNA, 23 nt, synthetic construct
  source 1..23: mol_type = other RNA
caccatggtgacagtgaggacga

SEQ ID NO: 3813 - RNA, 23 nt, synthetic construct
  source 1..23: mol_type = other RNA
atttggtcaaacaggatcaggcc

SEQ ID NO: 3814 - RNA, 23 nt, synthetic construct
  source 1..23: mol_type = other RNA
gccgttcttgctgaaaccgctgc

SEQ ID NO: 3815 - RNA, 23 nt, synthetic construct
  source 1..23: mol_type = other RNA
cagggcaggaatgtccacacgca

SEQ ID NO: 3816 - RNA, 23 nt, synthetic construct
  source 1..23: mol_type = other RNA
gccattgaaggtgacgctcacgc

SEQ ID NO: 3817 - RNA, 23 nt, synthetic construct
  source 1..23: mol_type = other RNA
ggtgttgttgtggaagaggctgt

SEQ ID NO: 3818 - RNA, 23 nt, synthetic construct
  source 1..23: mol_type = other RNA
gtccctctggttgttggtgcagg

SEQ ID NO: 3819 - RNA, 23 nt, synthetic construct
  source 1..23: mol_type = other RNA
ggttccgtcccgctggagacagt

SEQ ID NO: 3820 - RNA, 23 nt, synthetic construct
  source 1..23: mol_type = other RNA
gccatgtccttgcaactggcggc

SEQ ID NO: 3821 - RNA, 23 nt, synthetic construct
  source 1..23: mol_type = other RNA
cagccatcctttctgctgtcggg

SEQ ID NO: 3822 - RNA, 23 nt, synthetic construct
  source 1..23: mol_type = other RNA
cagcatcagatcacagagcggct

SEQ ID NO: 3823 - RNA, 23 nt, synthetic construct
  source 1..23: mol_type = other RNA
gtggcactcagcaaagacctggc

SEQ ID NO: 3824 - RNA, 23 nt, synthetic construct
  source 1..23: mol_type = other RNA
caggcgttgaagaatgggcccgg

SEQ ID NO: 3825 - RNA, 23 nt, synthetic construct
  source 1..23: mol_type = other RNA
gcagagctctgcgtaagcctcca

SEQ ID NO: 3826 - RNA, 23 nt, synthetic construct
  source 1..23: mol_type = other RNA
cctcgccagtcactgcacactcc

SEQ ID NO: 3827 - RNA, 23 nt, synthetic construct
  source 1..23: mol_type = other RNA
atggcttgtacactttggtgggt

SEQ ID NO: 3828 - RNA, 23 nt, synthetic construct
  source 1..23: mol_type = other RNA
ctctggttcctagagttgcaggt

SEQ ID NO: 3829 - RNA, 23 nt, synthetic construct
  source 1..23: mol_type = other RNA
gtgtgcgttgaagaggatctggt

SEQ ID NO: 3830 - RNA, 23 nt, synthetic construct
  source 1..23: mol_type = other RNA
caggcctgcacgcagatgcccat

SEQ ID NO: 3831 - RNA, 23 nt, synthetic construct
  source 1..23: mol_type = other RNA
ggaaatttaggaaacccatcggg

SEQ ID NO: 3832 - RNA, 23 nt, synthetic construct
  source 1..23: mol_type = other RNA
caggactggcagttgctgaccca

SEQ ID NO: 3833 - RNA, 23 nt, synthetic construct
  source 1..23: mol_type = other RNA
ctgcaccgacactgaaccctcgt

SEQ ID NO: 3834 - RNA, 23 nt, synthetic construct
  source 1..23: mol_type = other RNA
ctggtcacggttacgaagccggg

SEQ ID NO: 3835 - RNA, 23 nt, synthetic construct
  source 1..23: mol_type = other RNA
caggtggttgtgttgcacacgca

SEQ ID NO: 3836 - RNA, 23 nt, synthetic construct
  source 1..23: mol_type = other RNA
ctgggtgcagatggactcctgcc

SEQ ID NO: 3837 - RNA, 23 nt, synthetic construct
  source 1..23: mol_type = other RNA
ctgcagcggaaggtgggacagca

SEQ ID NO: 3838 - RNA, 23 nt, synthetic construct
  source 1..23: mol_type = other RNA
ccattgtacgaacacagctgagg

SEQ ID NO: 3839 - RNA, 23 nt, synthetic construct
  source 1..23: mol_type = other RNA
cgcctgggaaggttgcaccaacc

SEQ ID NO: 3840 - RNA, 23 nt, synthetic construct
  source 1..23: mol_type = other RNA
caggtacacatgtggcagggaag

SEQ ID NO: 3841 - RNA, 23 nt, synthetic construct
  source 1..23: mol_type = other RNA
atcctcctgacattgcaccgttg

SEQ ID NO: 3842 - RNA, 23 nt, synthetic construct
  source 1..23: mol_type = other RNA
ggacaggtagtattgttgcaggc

SEQ ID NO: 3843 - RNA, 23 nt, synthetic construct
  source 1..23: mol_type = other RNA
actctcttgtactcaaagccctg

SEQ ID NO: 3844 - RNA, 23 nt, synthetic construct
  source 1..23: mol_type = other RNA
ccaggtttcattcagctggactg

SEQ ID NO: 3845 - RNA, 23 nt, synthetic construct
  source 1..23: mol_type = other RNA
cagttgtccacatggctgttgac

SEQ ID NO: 3846 - RNA, 23 nt, synthetic construct
  source 1..23: mol_type = other RNA
cagcctcacagaggtacacggtg

SEQ ID NO: 3847 - RNA, 23 nt, synthetic construct
  source 1..23: mol_type = other RNA
ggtcagcaaatggactccaccct

SEQ ID NO: 3848 - RNA, 23 nt, synthetic construct
  source 1..23: mol_type = other RNA
cagctggacacatctgggcagga

SEQ ID NO: 3849 - RNA, 23 nt, synthetic construct
  source 1..23: mol_type = other RNA
cctcctcacaggagtagcagcag

SEQ ID NO: 3850 - RNA, 23 nt, synthetic construct
  source 1..23: mol_type = other RNA
gttgatgcggacttgacaggagt

SEQ ID NO: 3851 - RNA, 23 nt, synthetic construct
  source 1..23: mol_type = other RNA
ccctggtgccacaggatggtcgt

SEQ ID NO: 3852 - RNA, 23 nt, synthetic construct
  source 1..23: mol_type = other RNA
cctctgctgagtacttggacgct

SEQ ID NO: 3853 - RNA, 23 nt, synthetic construct
  source 1..23: mol_type = other RNA
gcaggtgcactggtgctgcatgg

SEQ ID NO: 3854 - RNA, 23 nt, synthetic construct
  source 1..23: mol_type = other RNA
ccgttaggacagtgcaagggcac

SEQ ID NO: 3855 - RNA, 23 nt, synthetic construct
  source 1..23: mol_type = other RNA
cacgtgggtgtaggtgtgcagga

SEQ ID NO: 3856 - RNA, 23 nt, synthetic construct
  source 1..23: mol_type = other RNA
cagggacacagaagggcgtgcag

SEQ ID NO: 3857 - RNA, 23 nt, synthetic construct
  source 1..23: mol_type = other RNA
gctccaggtggacagagcatggg

SEQ ID NO: 3858 - RNA, 23 nt, synthetic construct
  source 1..23: mol_type = other RNA
gttttcatgatcagacaatgcac

SEQ ID NO: 3859 - RNA, 23 nt, synthetic construct
  source 1..23: mol_type = other RNA
gtaggactcctgagtggcgccct

SEQ ID NO: 3860 - RNA, 23 nt, synthetic construct
  source 1..23: mol_type = other RNA
cgtcccagtgacatcagggaggg

SEQ ID NO: 3861 - RNA, 23 nt, synthetic construct
  source 1..23: mol_type = other RNA
cacatgcttagtttgttccaggg

SEQ ID NO: 3862 - RNA, 23 nt, synthetic construct
  source 1..23: mol_type = other RNA
gtggccagctggaatccgtgctg

SEQ ID NO: 3863 - RNA, 23 nt, synthetic construct
  source 1..23: mol_type = other RNA
ccttgcctggaccagcctgtctg

SEQ ID NO: 3864 - RNA, 23 nt, synthetic construct
  source 1..23: mol_type = other RNA
ctgtcgcagcttcctggcagcag

SEQ ID NO: 3865 - RNA, 23 nt, synthetic construct
  source 1..23: mol_type = other RNA
ctcagccctgagttaccctgcag

SEQ ID NO: 3866 - RNA, 23 nt, synthetic construct
  source 1..23: mol_type = other RNA
cctctctgacctggccgttgcga

SEQ ID NO: 3867 - RNA, 23 nt, synthetic construct
  source 1..23: mol_type = other RNA
gtttatttgcaaaactgggctgg

SEQ ID NO: 3868 - RNA, 21 nt, synthetic construct
  source 1..21: mol_type = other RNA
  modified_base 1: mod_base = OTHER; note = 2'-O-methyluridine-3'-phosphorothioate
  modified_base 2: mod_base = OTHER; note = 2'-O-methyluridine-3'-phosphorothioate
  modified_base 3: mod_base = OTHER; note = 2'-O-methylguanosine-3'-phosphate
  modified_base 4: mod_base = OTHER; note = 2'-O-methylguanosine-3'-phosphate
  modified_base 5: mod_base = OTHER; note = 2'-O-methylcytidine-3'-phosphate
  modified_base 6: mod_base = OTHER; note = 2'-O-hexadecyl-uridine-3'-phosphate
  modified_base 7: mod_base = OTHER; note = 2'-deoxy-2'-fluorocytidine-3'-phosphate
  modified_base 8: mod_base = OTHER; note = 2'-O-methyluridine-3'-phosphate
  modified_base 9: mod_base = OTHER; note = 2'-deoxy-2'-fluoroguanosine-3'-phosphate
  modified_base 10: mod_base = OTHER; note = 2'-deoxy-2'-fluoroguanosine-3'-phosphate
  modified_base 11: mod_base = OTHER; note = 2'-deoxy-2'-fluorocytidine-3'-phosphate
  modified_base 12: mod_base = OTHER; note = 2'-O-methylguanosine-3'-phosphate
  modified_base 13: mod_base = OTHER; note = 2'-O-methylguanosine-3'-phosphate
  modified_base 14: mod_base = OTHER; note = 2'-O-methylcytidine-3'-phosphate
  modified_base 15: mod_base = OTHER; note = 2'-O-methylcytidine-3'-phosphate
  modified_base 16: mod_base = OTHER; note = 2'-O-methyladenosine-3'-phosphate
  modified_base 17: mod_base = OTHER; note = 2'-O-methyluridine-3'-phosphate
  modified_base 18: mod_base = OTHER; note = 2'-O-methylguanosine-3'-phosphate
  modified_base 19: mod_base = OTHER; note = 2'-O-methylcytidine-3'-phosphorothioate
  modified_base 20: mod_base = OTHER; note = 2'-O-methyluridine-3'-phosphorothioate
  modified_base 21: mod_base = OTHER; note = 2'-O-methyladenosine
ttggctctggcggccatgcta

SEQ ID NO: 3869 - RNA, 21 nt, synthetic construct
  source 1..21: mol_type = other RNA
  modified_base 1: mod_base = OTHER; note = 2'-O-methylcytidine-3'-phosphorothioate
  modified_base 2: mod_base = OTHER; note = 2'-O-methyluridine-3'-phosphorothioate
  modified_base 3: mod_base = OTHER; note = 2'-O-methylguanosine-3'-phosphate
  modified_base 4: mod_base = OTHER; note = 2'-O-methylguanosine-3'-phosphate
  modified_base 5: mod_base = OTHER; note = 2'-O-methylguanosine-3'-phosphate
  modified_base 6: mod_base = OTHER; note = 2'-O-hexadecyl-adenosine-3'-phosphate
  modified_base 7: mod_base = OTHER; note = 2'-deoxy-2'-fluoroguanosine-3'-phosphate
  modified_base 8: mod_base = OTHER; note = 2'-O-methyladenosine-3'-phosphate
  modified_base 9: mod_base = OTHER; note = 2'-deoxy-2'-fluoroadenosine-3'-phosphate
  modified_base 10: mod_base = OTHER; note = 2'-deoxy-2'-fluorouridine-3'-phosphate
  modified_base 11: mod_base = OTHER; note = 2'-deoxy-2'-fluoroguanosine-3'-phosphate
  modified_base 12: mod_base = OTHER; note = 2'-O-methylcytidine-3'-phosphate
  modified_base 13: mod_base = OTHER; note = 2'-O-methyladenosine-3'-phosphate
  modified_base 14: mod_base = OTHER; note = 2'-O-methylguanosine-3'-phosphate
  modified_base 15: mod_base = OTHER; note = 2'-O-methylguanosine-3'-phosphate
  modified_base 16: mod_base = OTHER; note = 2'-O-methylguanosine-3'-phosphate
  modified_base 17: mod_base = OTHER; note = 2'-O-methylcytidine-3'-phosphate
  modified_base 18: mod_base = OTHER; note = 2'-O-methyladenosine-3'-phosphate
  modified_base 19: mod_base = OTHER; note = 2'-O-methylcytidine-3'-phosphorothioate
  modified_base 20: mod_base = OTHER; note = 2'-O-methyladenosine-3'-phosphorothioate
  modified_base 21: mod_base = OTHER; note = 2'-O-methyladenosine
ctgggagaatgcagggcacaa

SEQ ID NO: 3870 - RNA, 21 nt, synthetic construct
  source 1..21: mol_type = other RNA
  modified_base 1: mod_base = OTHER; note = 2'-O-methylguanosine-3'-phosphorothioate
  modified_base 2: mod_base = OTHER; note = 2'-O-methylcytidine-3'-phosphorothioate
  modified_base 3: mod_base = OTHER; note = 2'-O-methylguanosine-3'-phosphate
  modified_base 4: mod_base = OTHER; note = 2'-O-methylcytidine-3'-phosphate
  modified_base 5: mod_base = OTHER; note = 2'-O-methylguanosine-3'-phosphate
  modified_base 6: mod_base = OTHER; note = 2'-O-hexadecyl-uridine-3'-phosphate
  modified_base 7: mod_base = OTHER; note = 2'-deoxy-2'-fluoroguanosine-3'-phosphate
  modified_base 8: mod_base = OTHER; note = 2'-O-methyladenosine-3'-phosphate
  modified_base 9: mod_base = OTHER; note = 2'-deoxy-2'-fluoroguanosine-3'-phosphate
  modified_base 10: mod_base = OTHER; note = 2'-deoxy-2'-fluorocytidine-3'-phosphate
  modified_base 11: mod_base = OTHER; note = 2'-deoxy-2'-fluorouridine-3'-phosphate
  modified_base 12: mod_base = OTHER; note = 2'-O-methyluridine-3'-phosphate
  modified_base 13: mod_base = OTHER; note = 2'-O-methyluridine-3'-phosphate
  modified_base 14: mod_base = OTHER; note = 2'-O-methylguanosine-3'-phosphate
  modified_base 15: mod_base = OTHER; note = 2'-O-methyluridine-3'-phosphate
  modified_base 16: mod_base = OTHER; note = 2'-O-methyluridine-3'-phosphate
  modified_base 17: mod_base = OTHER; note = 2'-O-methylcytidine-3'-phosphate
  modified_base 18: mod_base = OTHER; note = 2'-O-methylcytidine-3'-phosphate
  modified_base 19: mod_base = OTHER; note = 2'-O-methyladenosine-3'-phosphorothioate
  modified_base 20: mod_base = OTHER; note = 2'-O-methylcytidine-3'-phosphorothioate
  modified_base 21: mod_base = OTHER; note = 2'-O-methyladenosine
gcgcgtgagctttgttccaca

SEQ ID NO: 3871 - RNA, 21 nt, synthetic construct
  source 1..21: mol_type = other RNA
  modified_base 1: mod_base = OTHER; note = 2'-O-methyluridine-3'-phosphorothioate
  modified_base 2: mod_base = OTHER; note = 2'-O-methylguanosine-3'-phosphorothioate
  modified_base 3: mod_base = OTHER; note = 2'-O-methylguanosine-3'-phosphate
  modified_base 4: mod_base = OTHER; note = 2'-O-methylguanosine-3'-phosphate
  modified_base 5: mod_base = OTHER; note = 2'-O-methylcytidine-3'-phosphate
  modified_base 6: mod_base = OTHER; note = 2'-O-hexadecyl-guanosine-3'-phosphate
  modified_base 7: mod_base = OTHER; note = 2'-deoxy-2'-fluoroguanosine-3'-phosphate
  modified_base 8: mod_base = OTHER; note = 2'-O-methylguanosine-3'-phosphate
  modified_base 9: mod_base = OTHER; note = 2'-deoxy-2'-fluorouridine-3'-phosphate
  modified_base 10: mod_base = OTHER; note = 2'-deoxy-2'-fluoroguanosine-3'-phosphate
  modified_base 11: mod_base = OTHER; note = 2'-deoxy-2'-fluorouridine-3'-phosphate
  modified_base 12: mod_base = OTHER; note = 2'-O-methylguanosine-3'-phosphate
  modified_base 13: mod_base = OTHER; note = 2'-O-methylcytidine-3'-phosphate
  modified_base 14: mod_base = OTHER; note = 2'-O-methyladenosine-3'-phosphate
  modified_base 15: mod_base = OTHER; note = 2'-O-methylguanosine-3'-phosphate
  modified_base 16: mod_base = OTHER; note = 2'-O-methylcytidine-3'-phosphate
  modified_base 17: mod_base = OTHER; note = 2'-O-methyladenosine-3'-phosphate
  modified_base 18: mod_base = OTHER; note = 2'-O-methylcytidine-3'-phosphate
  modified_base 19: mod_base = OTHER; note = 2'-O-methylcytidine-3'-phosphorothioate
  modified_base 20: mod_base = OTHER; note = 2'-O-methyluridine-3'-phosphorothioate
  modified_base 21: mod_base = OTHER; note = 2'-O-methyladenosine
tgggcgggtgtgcagcaccta

SEQ ID NO: 3872 - RNA, 21 nt, synthetic construct
  source 1..21: mol_type = other RNA
  modified_base 1: mod_base = OTHER; note = 2'-O-methylcytidine-3'-phosphorothioate
  modified_base 2: mod_base = OTHER; note = 2'-O-methylcytidine-3'-phosphorothioate
  modified_base 3: mod_base = OTHER; note = 2'-O-methyladenosine-3'-phosphate
  modified_base 4: mod_base = OTHER; note = 2'-O-methylcytidine-3'-phosphate
  modified_base 5: mod_base = OTHER; note = 2'-O-methyluridine-3'-phosphate
  modified_base 6: mod_base = OTHER; note = 2'-O-hexadecyl-adenosine-3'-phosphate
  modified_base 7: mod_base = OTHER; note = 2'-deoxy-2'-fluorocytidine-3'-phosphate
  modified_base 8: mod_base = OTHER; note = 2'-O-methyladenosine-3'-phosphate
  modified_base 9: mod_base = OTHER; note = 2'-deoxy-2'-fluoroadenosine-3'-phosphate
  modified_base 10: mod_base = OTHER; note = 2'-deoxy-2'-fluoroguanosine-3'-phosphate
  modified_base 11: mod_base = OTHER; note = 2'-deoxy-2'-fluoroadenosine-3'-phosphate
  modified_base 12: mod_base = OTHER; note = 2'-O-methylcytidine-3'-phosphate
  modified_base 13: mod_base = OTHER; note = 2'-O-methylcytidine-3'-phosphate
  modified_base 14: mod_base = OTHER; note = 2'-O-methyluridine-3'-phosphate
  modified_base 15: mod_base = OTHER; note = 2'-O-methyluridine-3'-phosphate
  modified_base 16: mod_base = OTHER; note = 2'-O-methylcytidine-3'-phosphate
  modified_base 17: mod_base = OTHER; note = 2'-O-methylguanosine-3'-phosphate
  modified_base 18: mod_base = OTHER; note = 2'-O-methyladenosine-3'-phosphate
  modified_base 19: mod_base = OTHER; note = 2'-O-methylcytidine-3'-phosphorothioate
  modified_base 20: mod_base = OTHER; note = 2'-O-methylguanosine-3'-phosphorothioate
  modified_base 21: mod_base = OTHER; note = 2'-O-methyladenosine
ccactacaagaccttcgacga

SEQ ID NO: 3873 - RNA, 21 nt, synthetic construct
  source 1..21: mol_type = other RNA
  modified_base 1: mod_base = OTHER; note = 2'-O-methylcytidine-3'-phosphorothioate
  modified_base 2: mod_base = OTHER; note = 2'-O-methylcytidine-3'-phosphorothioate
  modified_base 3: mod_base = OTHER; note = 2'-O-methyluridine-3'-phosphate
  modified_base 4: mod_base = OTHER; note = 2'-O-methyluridine-3'-phosphate
  modified_base 5: mod_base = OTHER; note = 2'-O-methyluridine-3'-phosphate
  modified_base 6: mod_base = OTHER; note = 2'-O-hexadecyl-guanosine-3'-phosphate
  modified_base 7: mod_base = OTHER; note = 2'-deoxy-2'-fluorocytidine-3'-phosphate
  modified_base 8: mod_base = OTHER; note = 2'-O-methyladenosine-3'-phosphate
  modified_base 9: mod_base = OTHER; note = 2'-deoxy-2'-fluoroadenosine-3'-phosphate
  modified_base 10: mod_base = OTHER; note = 2'-deoxy-2'-fluorocytidine-3'-phosphate
  modified_base 11: mod_base = OTHER; note = 2'-deoxy-2'-fluorouridine-3'-phosphate
  modified_base 12: mod_base = OTHER; note = 2'-O-methyladenosine-3'-phosphate
  modified_base 13: mod_base = OTHER; note = 2'-O-methylcytidine-3'-phosphate
  modified_base 14: mod_base = OTHER; note = 2'-O-methylguanosine-3'-phosphate
  modified_base 15: mod_base = OTHER; note = 2'-O-methyluridine-3'-phosphate
  modified_base 16: mod_base = OTHER; note = 2'-O-methylguanosine-3'-phosphate
  modified_base 17: mod_base = OTHER; note = 2'-O-methyluridine-3'-phosphate
  modified_base 18: mod_base = OTHER; note = 2'-O-methyluridine-3'-phosphate
  modified_base 19: mod_base = OTHER; note = 2'-O-methylcytidine-3'-phosphorothioate
  modified_base 20: mod_base = OTHER; note = 2'-O-methyluridine-3'-phosphorothioate
  modified_base 21: mod_base = OTHER; note = 2'-O-methyladenosine
cctttgcaactacgtgttcta

SEQ ID NO: 3874 - RNA, 21 nt, synthetic construct
  source 1..21: mol_type = other RNA
  modified_base 1: mod_base = OTHER; note = 2'-O-methylguanosine-3'-phosphorothioate
  modified_base 2: mod_base = OTHER; note = 2'-O-methyladenosine-3'-phosphorothioate
  modified_base 3: mod_base = OTHER; note = 2'-O-methylguanosine-3'-phosphate
  modified_base 4: mod_base = OTHER; note = 2'-O-methylguanosine-3'-phosphate
  modified_base 5: mod_base = OTHER; note = 2'-O-methyladenosine-3'-phosphate
  modified_base 6: mod_base = OTHER; note = 2'-O-hexadecyl-cytidine-3'-phosphate
  modified_base 7: mod_base = OTHER; note = 2'-deoxy-2'-fluorouridine-3'-phosphate
  modified_base 8: mod_base = OTHER; note = 2'-O-methyluridine-3'-phosphate
  modified_base 9: mod_base = OTHER; note = 2'-deoxy-2'-fluorocytidine-3'-phosphate
  modified_base 10: mod_base = OTHER; note = 2'-deoxy-2'-fluoroadenosine-3'-phosphate
  modified_base 11: mod_base = OTHER; note = 2'-deoxy-2'-fluoroadenosine-3'-phosphate
  modified_base 12: mod_base = OTHER; note = 2'-O-methylcytidine-3'-phosphate
  modified_base 13: mod_base = OTHER; note = 2'-O-methylguanosine-3'-phosphate
  modified_base 14: mod_base = OTHER; note = 2'-O-methyluridine-3'-phosphate
  modified_base 15: mod_base = OTHER; note = 2'-O-methylcytidine-3'-phosphate
  modified_base 16: mod_base = OTHER; note = 2'-O-methylcytidine-3'-phosphate
  modified_base 17: mod_base = OTHER; note = 2'-O-methyladenosine-3'-phosphate
  modified_base 18: mod_base = OTHER; note = 2'-O-methylguanosine-3'-phosphate
  modified_base 19: mod_base = OTHER; note = 2'-O-methylcytidine-3'-phosphorothioate
  modified_base 20: mod_base = OTHER; note = 2'-O-methyluridine-3'-phosphorothioate
  modified_base 21: mod_base = OTHER; note = 2'-O-methyladenosine
gaggacttcaacgtccagcta

SEQ ID NO: 3875 - RNA, 21 nt, synthetic construct
  source 1..21: mol_type = other RNA
  modified_base 1: mod_base = OTHER; note = 2'-O-methyladenosine-3'-phosphorothioate
  modified_base 2: mod_base = OTHER; note = 2'-O-methylcytidine-3'-phosphorothioate
  modified_base 3: mod_base = OTHER; note = 2'-O-methylcytidine-3'-phosphate
  modified_base 4: mod_base = OTHER; note = 2'-O-methylcytidine-3'-phosphate
  modified_base 5: mod_base = OTHER; note = 2'-O-methylguanosine-3'-phosphate
  modified_base 6: mod_base = OTHER; note = 2'-O-hexadecyl-uridine-3'-phosphate
  modified_base 7: mod_base = OTHER; note = 2'-deoxy-2'-fluoroguanosine-3'-phosphate
  modified_base 8: mod_base = OTHER; note = 2'-O-methyluridine-3'-phosphate
  modified_base 9: mod_base = OTHER; note = 2'-deoxy-2'-fluorouridine-3'-phosphate
  modified_base 10: mod_base = OTHER; note = 2'-deoxy-2'-fluoroguanosine-3'-phosphate
  modified_base 11: mod_base = OTHER; note = 2'-deoxy-2'-fluorouridine-3'-phosphate
  modified_base 12: mod_base = OTHER; note = 2'-O-methylcytidine-3'-phosphate
  modified_base 13: mod_base = OTHER; note = 2'-O-methyladenosine-3'-phosphate
  modified_base 14: mod_base = OTHER; note = 2'-O-methyluridine-3'-phosphate
  modified_base 15: mod_base = OTHER; note = 2'-O-methylcytidine-3'-phosphate
  modified_base 16: mod_base = OTHER; note = 2'-O-methyladenosine-3'-phosphate
  modified_base 17: mod_base = OTHER; note = 2'-O-methyladenosine-3'-phosphate
  modified_base 18: mod_base = OTHER; note = 2'-O-methylguanosine-3'-phosphate
  modified_base 19: mod_base = OTHER; note = 2'-O-methylguanosine-3'-phosphorothioate
  modified_base 20: mod_base = OTHER; note = 2'-O-methylcytidine-3'-phosphorothioate
  modified_base 21: mod_base = OTHER; note = 2'-O-methyladenosine
acccgtgttgtcatcaaggca

SEQ ID NO: 3876 - RNA, 21 nt, synthetic construct
  source 1..21: mol_type = other RNA
  modified_base 1: mod_base = OTHER; note = 2'-O-methylguanosine-3'-phosphorothioate
  modified_base 2: mod_base = OTHER; note = 2'-O-methylguanosine-3'-phosphorothioate
  modified_base 3: mod_base = OTHER; note = 2'-O-methylcytidine-3'-phosphate
  modified_base 4: mod_base = OTHER; note = 2'-O-methyluridine-3'-phosphate
  modified_base 5: mod_base = OTHER; note = 2'-O-methylcytidine-3'-phosphate
  modified_base 6: mod_base = OTHER; note = 2'-O-hexadecyl-cytidine-3'-phosphate
  modified_base 7: mod_base = OTHER; note = 2'-deoxy-2'-fluoroguanosine-3'-phosphate
  modified_base 8: mod_base = OTHER; note = 2'-O-methyluridine-3'-phosphate
  modified_base 9: mod_base = OTHER; note = 2'-deoxy-2'-fluorocytidine-3'-phosphate
  modified_base 10: mod_base = OTHER; note = 2'-deoxy-2'-fluorocytidine-3'-phosphate
  modified_base 11: mod_base = OTHER; note = 2'-deoxy-2'-fluorouridine-3'-phosphate
  modified_base 12: mod_base = OTHER; note = 2'-O-methylcytidine-3'-phosphate
  modified_base 13: mod_base = OTHER; note = 2'-O-methyladenosine-3'-phosphate
  modified_base 14: mod_base = OTHER; note = 2'-O-methyluridine-3'-phosphate
  modified_base 15: mod_base = OTHER; note = 2'-O-methylcytidine-3'-phosphate
  modified_base 16: mod_base = OTHER; note = 2'-O-methyladenosine-3'-phosphate
  modified_base 17: mod_base = OTHER; note = 2'-O-methyladenosine-3'-phosphate
  modified_base 18: mod_base = OTHER; note = 2'-O-methyluridine-3'-phosphate
  modified_base 19: mod_base = OTHER; note = 2'-O-methylguanosine-3'-phosphorothioate
  modified_base 20: mod_base = OTHER; note = 2'-O-methylguanosine-3'-phosphorothioate
  modified_base 21: mod_base = OTHER; note = 2'-O-methyladenosine
ggctccgtcctcatcaatgga

SEQ ID NO: 3877 - RNA, 21 nt, synthetic construct
  source 1..21: mol_type = other RNA
  modified_base 1: mod_base = OTHER; note = 2'-O-methylguanosine-3'-phosphorothioate
  modified_base 2: mod_base = OTHER; note = 2'-O-methylcytidine-3'-phosphorothioate
  modified_base 3: mod_base = OTHER; note = 2'-O-methyluridine-3'-phosphate
  modified_base 4: mod_base = OTHER; note = 2'-O-methylguanosine-3'-phosphate
  modified_base 5: mod_base = OTHER; note = 2'-O-methylcytidine-3'-phosphate
  modified_base 6: mod_base = OTHER; note = 2'-O-hexadecyl-cytidine-3'-phosphate
  modified_base 7: mod_base = OTHER; note = 2'-deoxy-2'-fluorouridine-3'-phosphate
  modified_base 8: mod_base = OTHER; note = 2'-O-methyluridine-3'-phosphate
  modified_base 9: mod_base = OTHER; note = 2'-deoxy-2'-fluoroadenosine-3'-phosphate
  modified_base 10: mod_base = OTHER; note = 2'-deoxy-2'-fluorocytidine-3'-phosphate
  modified_base 11: mod_base = OTHER; note = 2'-deoxy-2'-fluoroadenosine-3'-phosphate
  modified_base 12: mod_base = OTHER; note = 2'-O-methylguanosine-3'-phosphate
  modified_base 13: mod_base = OTHER; note = 2'-O-methylcytidine-3'-phosphate
  modified_base 14: mod_base = OTHER; note = 2'-O-methylcytidine-3'-phosphate
  modified_base 15: mod_base = OTHER; note = 2'-O-methylguanosine-3'-phosphate
  modified_base 16: mod_base = OTHER; note = 2'-O-methylcytidine-3'-phosphate
  modified_base 17: mod_base = OTHER; note = 2'-O-methyladenosine-3'-phosphate
  modified_base 18: mod_base = OTHER; note = 2'-O-methylcytidine-3'-phosphate
  modified_base 19: mod_base = OTHER; note = 2'-O-methyluridine-3'-phosphorothioate
  modified_base 20: mod_base = OTHER; note = 2'-O-methylguanosine-3'-phosphorothioate
  modified_base 21: mod_base = OTHER; note = 2'-O-methyladenosine
gctgccttacagccgcactga

SEQ ID NO: 3878 - RNA, 21 nt, synthetic construct
  source 1..21: mol_type = other RNA
  modified_base 1: mod_base = OTHER; note = 2'-O-methylguanosine-3'-phosphorothioate
  modified_base 2: mod_base = OTHER; note = 2'-O-methyladenosine-3'-phosphorothioate
  modified_base 3: mod_base = OTHER; note = 2'-O-methylcytidine-3'-phosphate
  modified_base 4: mod_base = OTHER; note = 2'-O-methyluridine-3'-phosphate
  modified_base 5: mod_base = OTHER; note = 2'-O-methyladenosine-3'-phosphate
  modified_base 6: mod_base = OTHER; note = 2'-O-hexadecyl-cytidine-3'-phosphate
  modified_base 7: mod_base = OTHER; note = 2'-deoxy-2'-fluoroadenosine-3'-phosphate
  modified_base 8: mod_base = OTHER; note = 2'-O-methyluridine-3'-phosphate
  modified_base 9: mod_base = OTHER; note = 2'-deoxy-2'-fluorocytidine-3'-phosphate
  modified_base 10: mod_base = OTHER; note = 2'-deoxy-2'-fluoroadenosine-3'-phosphate
  modified_base 11: mod_base = OTHER; note = 2'-deoxy-2'-fluoroadenosine-3'-phosphate
  modified_base 12: mod_base = OTHER; note = 2'-O-methylguanosine-3'-phosphate
  modified_base 13: mod_base = OTHER; note = 2'-O-methylguanosine-3'-phosphate
  modified_base 14: mod_base = OTHER; note = 2'-O-methyluridine-3'-phosphate
  modified_base 15: mod_base = OTHER; note = 2'-O-methylcytidine-3'-phosphate
  modified_base 16: mod_base = OTHER; note = 2'-O-methyladenosine-3'-phosphate
  modified_base 17: mod_base = OTHER; note = 2'-O-methylguanosine-3'-phosphate
  modified_base 18: mod_base = OTHER; note = 2'-O-methylcytidine-3'-phosphate
  modified_base 19: mod_base = OTHER; note = 2'-O-methyladenosine-3'-phosphorothioate
  modified_base 20: mod_base = OTHER; note = 2'-O-methyluridine-3'-phosphorothioate
  modified_base 21: mod_base = OTHER; note = 2'-O-methyladenosine
gactacatcaaggtcagcata

SEQ ID NO: 3879 - RNA, 21 nt, synthetic construct
  source 1..21: mol_type = other RNA
  modified_base 1: mod_base = OTHER; note = 2'-O-methylguanosine-3'-phosphorothioate
  modified_base 2: mod_base = OTHER; note = 2'-O-methylcytidine-3'-phosphorothioate
  modified_base 3: mod_base = OTHER; note = 2'-O-methyluridine-3'-phosphate
  modified_base 4: mod_base = OTHER; note = 2'-O-methylguanosine-3'-phosphate
  modified_base 5: mod_base = OTHER; note = 2'-O-methyladenosine-3'-phosphate
  modified_base 6: mod_base = OTHER; note = 2'-O-hexadecyl-cytidine-3'-phosphate
  modified_base 7: mod_base = OTHER; note = 2'-deoxy-2'-fluoroadenosine-3'-phosphate
  modified_base 8: mod_base = OTHER; note = 2'-O-methyluridine-3'-phosphate
  modified_base 9: mod_base = OTHER; note = 2'-deoxy-2'-fluorouridine-3'-phosphate
  modified_base 10: mod_base = OTHER; note = 2'-deoxy-2'-fluorocytidine-3'-phosphate
  modified_base 11: mod_base = OTHER; note = 2'-deoxy-2'-fluorocytidine-3'-phosphate
  modified_base 12: mod_base = OTHER; note = 2'-O-methyluridine-3'-phosphate
  modified_base 13: mod_base = OTHER; note = 2'-O-methylguanosine-3'-phosphate
  modified_base 14: mod_base = OTHER; note = 2'-O-methyluridine-3'-phosphate
  modified_base 15: mod_base = OTHER; note = 2'-O-methylguanosine-3'-phosphate
  modified_base 16: mod_base = OTHER; note = 2'-O-methylguanosine-3'-phosphate
  modified_base 17: mod_base = OTHER; note = 2'-O-methyladenosine-3'-phosphate
  modified_base 18: mod_base = OTHER; note = 2'-O-methyladenosine-3'-phosphate
  modified_base 19: mod_base = OTHER; note = 2'-O-methylcytidine-3'-phosphorothioate
  modified_base 20: mod_base = OTHER; note = 2'-O-methylguanosine-3'-phosphorothioate
  modified_base 21: mod_base = OTHER; note = 2'-O-methyladenosine
gctgacattcctgtggaacga

SEQ ID NO: 3880 - RNA, 21 nt, synthetic construct
  source 1..21: mol_type = other RNA
  modified_base 1: mod_base = OTHER; note = 2'-O-methylcytidine-3'-phosphorothioate
  modified_base 2: mod_base = OTHER; note = 2'-O-methyluridine-3'-phosphorothioate
  modified_base 3: mod_base = OTHER; note = 2'-O-methylguanosine-3'-phosphate
  modified_base 4: mod_base = OTHER; note = 2'-O-methylguanosine-3'-phosphate
  modified_base 5: mod_base = OTHER; note = 2'-O-methyladenosine-3'-phosphate
  modified_base 6: mod_base = OTHER; note = 2'-O-hexadecyl-uridine-3'-phosphate
  modified_base 7: mod_base = OTHER; note = 2'-deoxy-2'-fluorocytidine-3'-phosphate
  modified_base 8: mod_base = OTHER; note = 2'-O-methylcytidine-3'-phosphate
  modified_base 9: mod_base = OTHER; note = 2'-deoxy-2'-fluorocytidine-3'-phosphate
  modified_base 10: mod_base = OTHER; note = 2'-deoxy-2'-fluoroadenosine-3'-phosphate
  modified_base 11: mod_base = OTHER; note = 2'-deoxy-2'-fluoroadenosine-3'-phosphate
  modified_base 12: mod_base = OTHER; note = 2'-O-methyladenosine-3'-phosphate
  modified_base 13: mod_base = OTHER; note = 2'-O-methyluridine-3'-phosphate
  modified_base 14: mod_base = OTHER; note = 2'-O-methyladenosine-3'-phosphate
  modified_base 15: mod_base = OTHER; note = 2'-O-methylcytidine-3'-phosphate
  modified_base 16: mod_base = OTHER; note = 2'-O-methylguanosine-3'-phosphate
  modified_base 17: mod_base = OTHER; note = 2'-O-methylcytidine-3'-phosphate
  modified_base 18: mod_base = OTHER; note = 2'-O-methylcytidine-3'-phosphate
  modified_base 19: mod_base = OTHER; note = 2'-O-methyladenosine-3'-phosphorothioate
  modified_base 20: mod_base = OTHER; note = 2'-O-methyladenosine-3'-phosphorothioate
  modified_base 21: mod_base = OTHER; note = 2'-O-methyladenosine
ctggatcccaaatacgccaaa

SEQ ID NO: 3881 - RNA, 21 nt, synthetic construct
  source 1..21: mol_type = other RNA
  modified_base 1: mod_base = OTHER; note = 2'-O-methylguanosine-3'-phosphorothioate
  modified_base 2: mod_base = OTHER; note = 2'-O-methylcytidine-3'-phosphorothioate
  modified_base 3: mod_base = OTHER; note = 2'-O-methylcytidine-3'-phosphate
  modified_base 4: mod_base = OTHER; note = 2'-O-methyluridine-3'-phosphate
  modified_base 5: mod_base = OTHER; note = 2'-O-methyluridine-3'-phosphate
  modified_base 6: mod_base = OTHER; note = 2'-O-hexadecyl-cytidine-3'-phosphate
  modified_base 7: mod_base = OTHER; note = 2'-deoxy-2'-fluoroadenosine-3'-phosphate
  modified_base 8: mod_base = OTHER; note = 2'-O-methyladenosine-3'-phosphate
  modified_base 9: mod_base = OTHER; note = 2'-deoxy-2'-fluorocytidine-3'-phosphate
  modified_base 10: mod_base = OTHER; note = 2'-deoxy-2'-fluoroguanosine-3'-phosphate
  modified_base 11: mod_base = OTHER; note = 2'-deoxy-2'-fluoroadenosine-3'-phosphate
  modified_base 12: mod_base = OTHER; note = 2'-O-methylguanosine-3'-phosphate
  modified_base 13: mod_base = OTHER; note = 2'-O-methyluridine-3'-phosphate
  modified_base 14: mod_base = OTHER; note = 2'-O-methyluridine-3'-phosphate
  modified_base 15: mod_base = OTHER; note = 2'-O-methylcytidine-3'-phosphate
  modified_base 16: mod_base = OTHER; note = 2'-O-methyluridine-3'-phosphate
  modified_base 17: mod_base = OTHER; note = 2'-O-methyladenosine-3'-phosphate
  modified_base 18: mod_base = OTHER; note = 2'-O-methyluridine-3'-phosphate
  modified_base 19: mod_base = OTHER; note = 2'-O-methylguanosine-3'-phosphorothioate
  modified_base 20: mod_base = OTHER; note = 2'-O-methylcytidine-3'-phosphorothioate
  modified_base 21: mod_base = OTHER; note = 2'-O-methyladenosine
gccttcaacgagttctatgca

SEQ ID NO: 3882 - RNA, 21 nt, synthetic construct
  source 1..21: mol_type = other RNA
  modified_base 1: mod_base = OTHER; note = 2'-O-methyladenosine-3'-phosphorothioate
  modified_base 2: mod_base = OTHER; note = 2'-O-methyladenosine-3'-phosphorothioate
  modified_base 3: mod_base = OTHER; note = 2'-O-methylcytidine-3'-phosphate
  modified_base 4: mod_base = OTHER; note = 2'-O-methylcytidine-3'-phosphate
  modified_base 5: mod_base = OTHER; note = 2'-O-methyluridine-3'-phosphate
  modified_base 6: mod_base = OTHER; note = 2'-O-hexadecyl-guanosine-3'-phosphate
  modified_base 7: mod_base = OTHER; note = 2'-deoxy-2'-fluorocytidine-3'-phosphate
  modified_base 8: mod_base = OTHER; note = 2'-O-methyladenosine-3'-phosphate
  modified_base 9: mod_base = OTHER; note = 2'-deoxy-2'-fluoroguanosine-3'-phosphate
  modified_base 10: mod_base = OTHER; note = 2'-deoxy-2'-fluoroadenosine-3'-phosphate
  modified_base 11: mod_base = OTHER; note = 2'-deoxy-2'-fluoroadenosine-3'-phosphate
  modified_base 12: mod_base = OTHER; note = 2'-O-methylguanosine-3'-phosphate
  modified_base 13: mod_base = OTHER; note = 2'-O-methyluridine-3'-phosphate
  modified_base 14: mod_base = OTHER; note = 2'-O-methyluridine-3'-phosphate
  modified_base 15: mod_base = OTHER; note = 2'-O-methylguanosine-3'-phosphate
  modified_base 16: mod_base = OTHER; note = 2'-O-methylguanosine-3'-phosphate
  modified_base 17: mod_base = OTHER; note = 2'-O-methyladenosine-3'-phosphate
  modified_base 18: mod_base = OTHER; note = 2'-O-methyluridine-3'-phosphate
  modified_base 19: mod_base = OTHER; note = 2'-O-methylguanosine-3'-phosphorothioate
  modified_base 20: mod_base = OTHER; note = 2'-O-methylguanosine-3'-phosphorothioate
  modified_base 21: mod_base = OTHER; note = 2'-O-methyladenosine
aacctgcagaagttggatgga

SEQ ID NO: 3883 - RNA, 21 nt, synthetic construct
  source 1..21: mol_type = other RNA
  modified_base 1: mod_base = OTHER; note = 2'-O-methyluridine-3'-phosphorothioate
  modified_base 2: mod_base = OTHER; note = 2'-O-methylguanosine-3'-phosphorothioate
  modified_base 3: mod_base = OTHER; note = 2'-O-methylcytidine-3'-phosphate
  modified_base 4: mod_base = OTHER; note = 2'-O-methyladenosine-3'-phosphate
  modified_base 5: mod_base = OTHER; note = 2'-O-methylcytidine-3'-phosphate
  modified_base 6: mod_base = OTHER; note = 2'-O-hexadecyl-guanosine-3'-phosphate
  modified_base 7: mod_base = OTHER; note = 2'-deoxy-2'-fluoroguanosine-3'-phosphate
  modified_base 8: mod_base = OTHER; note = 2'-O-methyladenosine-3'-phosphate
  modified_base 9: mod_base = OTHER; note = 2'-deoxy-2'-fluorocytidine-3'-phosphate
  modified_base 10: mod_base = OTHER; note = 2'-deoxy-2'-fluoroguanosine-3'-phosphate
  modified_base 11: mod_base = OTHER; note = 2'-deoxy-2'-fluoroadenosine-3'-phosphate
  modified_base 12: mod_base = OTHER; note = 2'-O-methylguanosine-3'-phosphate
  modified_base 13: mod_base = OTHER; note = 2'-O-methylguanosine-3'-phosphate
  modified_base 14: mod_base = OTHER; note = 2'-O-methyladenosine-3'-phosphate
  modified_base 15: mod_base = OTHER; note = 2'-O-methylguanosine-3'-phosphate
  modified_base 16: mod_base = OTHER; note = 2'-O-methylguanosine-3'-phosphate
  modified_base 17: mod_base = OTHER; note = 2'-O-methylguanosine-3'-phosphate
  modified_base 18: mod_base = OTHER; note = 2'-O-methylcytidine-3'-phosphate
  modified_base 19: mod_base = OTHER; note = 2'-O-methyladenosine-3'-phosphorothioate
  modified_base 20: mod_base = OTHER; note = 2'-O-methyluridine-3'-phosphorothioate
  modified_base 21: mod_base = OTHER; note = 2'-O-methyladenosine
tgcacggacgaggagggcata

SEQ ID NO: 3884 - RNA, 21 nt, synthetic construct
  source 1..21: mol_type = other RNA
  modified_base 1: mod_base = OTHER; note = 2'-O-methyluridine-3'-phosphorothioate
  modified_base 2: mod_base = OTHER; note = 2'-O-methyluridine-3'-phosphorothioate
  modified_base 3: mod_base = OTHER; note = 2'-O-methyluridine-3'-phosphate
  modified_base 4: mod_base = OTHER; note = 2'-O-methylguanosine-3'-phosphate
  modified_base 5: mod_base = OTHER; note = 2'-O-methylcytidine-3'-phosphate
  modified_base 6: mod_base = OTHER; note = 2'-O-hexadecyl-guanosine-3'-phosphate
  modified_base 7: mod_base = OTHER; note = 2'-deoxy-2'-fluoroguanosine-3'-phosphate
  modified_base 8: mod_base = OTHER; note = 2'-O-methyladenosine-3'-phosphate
  modified_base 9: mod_base = OTHER; note = 2'-deoxy-2'-fluoroguanosine-3'-phosphate
  modified_base 10: mod_base = OTHER; note = 2'-deoxy-2'-fluorouridine-3'-phosphate
  modified_base 11: mod_base = OTHER; note = 2'-deoxy-2'-fluoroguanosine-3'-phosphate
  modified_base 12: mod_base = OTHER; note = 2'-O-methylcytidine-3'-phosphate
  modified_base 13: mod_base = OTHER; note = 2'-O-methylcytidine-3'-phosphate
  modified_base 14: mod_base = OTHER; note = 2'-O-methyladenosine-3'-phosphate
  modified_base 15: mod_base = OTHER; note = 2'-O-methylcytidine-3'-phosphate
  modified_base 16: mod_base = OTHER; note = 2'-O-methylguanosine-3'-phosphate
  modified_base 17: mod_base = OTHER; note = 2'-O-methylcytidine-3'-phosphate
  modified_base 18: mod_base = OTHER; note = 2'-O-methyladenosine-3'-phosphate
  modified_base 19: mod_base = OTHER; note = 2'-O-methylcytidine-3'-phosphorothioate
  modified_base 20: mod_base = OTHER; note = 2'-O-methyluridine-3'-phosphorothioate
  modified_base 21: mod_base = OTHER; note = 2'-O-methyladenosine
tttgcggagtgccacgcacta

SEQ ID NO: 3885 - RNA, 21 nt, synthetic construct
  source 1..21: mol_type = other RNA
  modified_base 1: mod_base = OTHER; note = 2'-O-methylguanosine-3'-phosphorothioate
  modified_base 2: mod_base = OTHER; note = 2'-O-methyladenosine-3'-phosphorothioate
  modified_base 3: mod_base = OTHER; note = 2'-O-methylcytidine-3'-phosphate
  modified_base 4: mod_base = OTHER; note = 2'-O-methyladenosine-3'-phosphate
  modified_base 5: mod_base = OTHER; note = 2'-O-methylguanosine-3'-phosphate
  modified_base 6: mod_base = OTHER; note = 2'-O-hexadecyl-cytidine-3'-phosphate
  modified_base 7: mod_base = OTHER; note = 2'-deoxy-2'-fluoroadenosine-3'-phosphate
  modified_base 8: mod_base = OTHER; note = 2'-O-methylcytidine-3'-phosphate
  modified_base 9: mod_base = OTHER; note = 2'-deoxy-2'-fluorouridine-3'-phosphate
  modified_base 10: mod_base = OTHER; note = 2'-deoxy-2'-fluoroguanosine-3'-phosphate
  modified_base 11: mod_base = OTHER; note = 2'-deoxy-2'-fluorocytidine-3'-phosphate
  modified_base 12: mod_base = OTHER; note = 2'-O-methylguanosine-3'-phosphate
  modified_base 13: mod_base = OTHER; note = 2'-O-methyluridine-3'-phosphate
  modified_base 14: mod_base = OTHER; note = 2'-O-methyladenosine-3'-phosphate
  modified_base 15: mod_base = OTHER; note = 2'-O-methylcytidine-3'-phosphate
  modified_base 16: mod_base = OTHER; note = 2'-O-methylcytidine-3'-phosphate
  modified_base 17: mod_base = OTHER; note = 2'-O-methyluridine-3'-phosphate
  modified_base 18: mod_base = OTHER; note = 2'-O-methylguanosine-3'-phosphate
  modified_base 19: mod_base = OTHER; note = 2'-O-methylguanosine-3'-phosphorothioate
  modified_base 20: mod_base = OTHER; note = 2'-O-methylcytidine-3'-phosphorothioate
  modified_base 21: mod_base = OTHER; note = 2'-O-methyladenosine
gacagcactgcgtacctggca

SEQ ID NO: 3886 - RNA, 21 nt, synthetic construct
  source 1..21: mol_type = other RNA
  modified_base 1: mod_base = OTHER; note = 2'-O-methylguanosine-3'-phosphorothioate
  modified_base 2: mod_base = OTHER; note = 2'-O-methylcytidine-3'-phosphorothioate
  modified_base 3: mod_base = OTHER; note = 2'-O-methylcytidine-3'-phosphate
  modified_base 4: mod_base = OTHER; note = 2'-O-methyladenosine-3'-phosphate
  modified_base 5: mod_base = OTHER; note = 2'-O-methylcytidine-3'-phosphate
  modified_base 6: mod_base = OTHER; note = 2'-O-hexadecyl-cytidine-3'-phosphate
  modified_base 7: mod_base = OTHER; note = 2'-deoxy-2'-fluorouridine-3'-phosphate
  modified_base 8: mod_base = OTHER; note = 2'-O-methyluridine-3'-phosphate
  modified_base 9: mod_base = OTHER; note = 2'-deoxy-2'-fluorouridine-3'-phosphate
  modified_base 10: mod_base = OTHER; note = 2'-deoxy-2'-fluoroguanosine-3'-phosphate
  modified_base 11: mod_base = OTHER; note = 2'-deoxy-2'-fluorouridine-3'-phosphate
  modified_base 12: mod_base = OTHER; note = 2'-O-methylguanosine-3'-phosphate
  modified_base 13: mod_base = OTHER; note = 2'-O-methylguanosine-3'-phosphate
  modified_base 14: mod_base = OTHER; note = 2'-O-methyladenosine-3'-phosphate
  modified_base 15: mod_base = OTHER; note = 2'-O-methyladenosine-3'-phosphate
  modified_base 16: mod_base = OTHER; note = 2'-O-methyluridine-3'-phosphate
  modified_base 17: mod_base = OTHER; note = 2'-O-methyladenosine-3'-phosphate
  modified_base 18: mod_base = OTHER; note = 2'-O-methylcytidine-3'-phosphate
  modified_base 19: mod_base = OTHER; note = 2'-O-methyluridine-3'-phosphorothioate
  modified_base 20: mod_base = OTHER; note = 2'-O-methylcytidine-3'-phosphorothioate
  modified_base 21: mod_base = OTHER; note = 2'-O-methyladenosine
gccacctttgtggaatactca

SEQ ID NO: 3887 - RNA, 21 nt, synthetic construct
  source 1..21: mol_type = other RNA
  modified_base 1: mod_base = OTHER; note = 2'-O-methylcytidine-3'-phosphorothioate
  modified_base 2: mod_base = OTHER; note = 2'-O-methyluridine-3'-phosphorothioate
  modified_base 3: mod_base = OTHER; note = 2'-O-methylguanosine-3'-phosphate
  modified_base 4: mod_base = OTHER; note = 2'-O-methylguanosine-3'-phosphate
  modified_base 5: mod_base = OTHER; note = 2'-O-methyladenosine-3'-phosphate
  modified_base 6: mod_base = OTHER; note = 2'-O-hexadecyl-guanosine-3'-phosphate
  modified_base 7: mod_base = OTHER; note = 2'-deoxy-2'-fluoroguanosine-3'-phosphate
  modified_base 8: mod_base = OTHER; note = 2'-O-methyluridine-3'-phosphate
  modified_base 9: mod_base = OTHER; note = 2'-deoxy-2'-fluoroguanosine-3'-phosphate
  modified_base 10: mod_base = OTHER; note = 2'-deoxy-2'-fluorocytidine-3'-phosphate
  modified_base 11: mod_base = OTHER; note = 2'-deoxy-2'-fluorocytidine-3'-phosphate
  modified_base 12: mod_base = OTHER; note = 2'-O-methylcytidine-3'-phosphate
  modified_base 13: mod_base = OTHER; note = 2'-O-methyluridine-3'-phosphate
  modified_base 14: mod_base = OTHER; note = 2'-O-methylguanosine-3'-phosphate
  modified_base 15: mod_base = OTHER; note = 2'-O-methyladenosine-3'-phosphate
  modified_base 16: mod_base = OTHER; note = 2'-O-methylguanosine-3'-phosphate
  modified_base 17: mod_base = OTHER; note = 2'-O-methylcytidine-3'-phosphate
  modified_base 18: mod_base = OTHER; note = 2'-O-methyluridine-3'-phosphate
  modified_base 19: mod_base = OTHER; note = 2'-O-methylcytidine-3'-phosphorothioate
  modified_base 20: mod_base = OTHER; note = 2'-O-methyluridine-3'-phosphorothioate
  modified_base 21: mod_base = OTHER; note = 2'-O-methyladenosine
ctggaggtgccctgagctcta

SEQ ID NO: 3888 - RNA, 21 nt, synthetic construct
  source 1..21: mol_type = other RNA
  modified_base 1: mod_base = OTHER; note = 2'-O-methylcytidine-3'-phosphorothioate
  modified_base 2: mod_base = OTHER; note = 2'-O-methyluridine-3'-phosphorothioate
  modified_base 3: mod_base = OTHER; note = 2'-O-methylcytidine-3'-phosphate
  modified_base 4: mod_base = OTHER; note = 2'-O-methyladenosine-3'-phosphate
  modified_base 5: mod_base = OTHER; note = 2'-O-methyladenosine-3'-phosphate
  modified_base 6: mod_base = OTHER; note = 2'-O-hexadecyl-cytidine-3'-phosphate
  modified_base 7: mod_base = OTHER; note = 2'-deoxy-2'-fluoroadenosine-3'-phosphate
  modified_base 8: mod_base = OTHER; note = 2'-O-methyluridine-3'-phosphate
  modified_base 9: mod_base = OTHER; note = 2'-deoxy-2'-fluoroguanosine-3'-phosphate
  modified_base 10: mod_base = OTHER; note = 2'-deoxy-2'-fluorocytidine-3'-phosphate
  modified_base 11: mod_base = OTHER; note = 2'-deoxy-2'-fluoroadenosine-3'-phosphate
  modified_base 12: mod_base = OTHER; note = 2'-O-methylguanosine-3'-phosphate
  modified_base 13: mod_base = OTHER; note = 2'-O-methylcytidine-3'-phosphate
  modified_base 14: mod_base = OTHER; note = 2'-O-methyladenosine-3'-phosphate
  modified_base 15: mod_base = OTHER; note = 2'-O-methylcytidine-3'-phosphate
  modified_base 16: mod_base = OTHER; note = 2'-O-methylcytidine-3'-phosphate
  modified_base 17: mod_base = OTHER; note = 2'-O-methyladenosine-3'-phosphate
  modified_base 18: mod_base = OTHER; note = 2'-O-methylguanosine-3'-phosphate
  modified_base 19: mod_base = OTHER; note = 2'-O-methylguanosine-3'-phosphorothioate
  modified_base 20: mod_base = OTHER; note = 2'-O-methyladenosine-3'-phosphorothioate
  modified_base 21: mod_base = OTHER; note = 2'-O-methyladenosine
ctcaacatgcagcaccaggaa

SEQ ID NO: 3889 - RNA, 21 nt, synthetic construct
  source 1..21: mol_type = other RNA
  modified_base 1: mod_base = OTHER; note = 2'-O-methyladenosine-3'-phosphorothioate
  modified_base 2: mod_base = OTHER; note = 2'-O-methylcytidine-3'-phosphorothioate
  modified_base 3: mod_base = OTHER; note = 2'-O-methylcytidine-3'-phosphate
  modified_base 4: mod_base = OTHER; note = 2'-O-methylcytidine-3'-phosphate
  modified_base 5: mod_base = OTHER; note = 2'-O-methyluridine-3'-phosphate
  modified_base 6: mod_base = OTHER; note = 2'-O-hexadecyl-guanosine-3'-phosphate
  modified_base 7: mod_base = OTHER; note = 2'-deoxy-2'-fluorocytidine-3'-phosphate
  modified_base 8: mod_base = OTHER; note = 2'-O-methyladenosine-3'-phosphate
  modified_base 9: mod_base = OTHER; note = 2'-deoxy-2'-fluorocytidine-3'-phosphate
  modified_base 10: mod_base = OTHER; note = 2'-deoxy-2'-fluoroguanosine-3'-phosphate
  modified_base 11: mod_base = OTHER; note = 2'-deoxy-2'-fluoroguanosine-3'-phosphate
  modified_base 12: mod_base = OTHER; note = 2'-O-methyladenosine-3'-phosphate
  modified_base 13: mod_base = OTHER; note = 2'-O-methylcytidine-3'-phosphate
  modified_base 14: mod_base = OTHER; note = 2'-O-methyladenosine-3'-phosphate
  modified_base 15: mod_base = OTHER; note = 2'-O-methylcytidine-3'-phosphate
  modified_base 16: mod_base = OTHER; note = 2'-O-methylcytidine-3'-phosphate
  modified_base 17: mod_base = OTHER; note = 2'-O-methyluridine-3'-phosphate
  modified_base 18: mod_base = OTHER; note = 2'-O-methylguanosine-3'-phosphate
  modified_base 19: mod_base = OTHER; note = 2'-O-methylcytidine-3'-phosphorothioate
  modified_base 20: mod_base = OTHER; note = 2'-O-methyluridine-3'-phosphorothioate
  modified_base 21: mod_base = OTHER; note = 2'-O-methyladenosine
accctgcacggacacctgcta

SEQ ID NO: 3890 - RNA, 21 nt, synthetic construct
  source 1..21: mol_type = other RNA
  modified_base 1: mod_base = OTHER; note = 2'-O-methylguanosine-3'-phosphorothioate
  modified_base 2: mod_base = OTHER; note = 2'-O-methylguanosine-3'-phosphorothioate
  modified_base 3: mod_base = OTHER; note = 2'-O-methyladenosine-3'-phosphate
  modified_base 4: mod_base = OTHER; note = 2'-O-methylcytidine-3'-phosphate
  modified_base 5: mod_base = OTHER; note = 2'-O-methylcytidine-3'-phosphate
  modified_base 6: mod_base = OTHER; note = 2'-O-hexadecyl-adenosine-3'-phosphate
  modified_base 7: mod_base = OTHER; note = 2'-deoxy-2'-fluorocytidine-3'-phosphate
  modified_base 8: mod_base = OTHER; note = 2'-O-methyluridine-3'-phosphate
  modified_base 9: mod_base = OTHER; note = 2'-deoxy-2'-fluoroguanosine-3'-phosphate
  modified_base 10: mod_base = OTHER; note = 2'-deoxy-2'-fluorouridine-3'-phosphate
  modified_base 11: mod_base = OTHER; note = 2'-deoxy-2'-fluoroguanosine-3'-phosphate
  modified_base 12: mod_base = OTHER; note = 2'-O-methyluridine-3'-phosphate
  modified_base 13: mod_base = OTHER; note = 2'-O-methylguanosine-3'-phosphate
  modified_base 14: mod_base = OTHER; note = 2'-O-methylguanosine-3'-phosphate
  modified_base 15: mod_base = OTHER; note = 2'-O-methyladenosine-3'-phosphate
  modified_base 16: mod_base = OTHER; note = 2'-O-methylcytidine-3'-phosphate
  modified_base 17: mod_base = OTHER; note = 2'-O-methylguanosine-3'-phosphate
  modified_base 18: mod_base = OTHER; note = 2'-O-methylguanosine-3'-phosphate
  modified_base 19: mod_base = OTHER; note = 2'-O-methylcytidine-3'-phosphorothioate
  modified_base 20: mod_base = OTHER; note = 2'-O-methyluridine-3'-phosphorothioate
  modified_base 21: mod_base = OTHER; note = 2'-O-methyladenosine
ggaccactgtgtggacggcta

SEQ ID NO: 3891 - RNA, 21 nt, synthetic construct
  source 1..21: mol_type = other RNA
  modified_base 1: mod_base = OTHER; note = 2'-O-methylguanosine-3'-phosphorothioate
  modified_base 2: mod_base = OTHER; note = 2'-O-methylcytidine-3'-phosphorothioate
  modified_base 3: mod_base = OTHER; note = 2'-O-methyluridine-3'-phosphate
  modified_base 4: mod_base = OTHER; note = 2'-O-methylguanosine-3'-phosphate
  modified_base 5: mod_base = OTHER; note = 2'-O-methylguanosine-3'-phosphate
  modified_base 6: mod_base = OTHER; note = 2'-O-hexadecyl-adenosine-3'-phosphate
  modified_base 7: mod_base = OTHER; note = 2'-deoxy-2'-fluorouridine-3'-phosphate
  modified_base 8: mod_base = OTHER; note = 2'-O-methylguanosine-3'-phosphate
  modified_base 9: mod_base = OTHER; note = 2'-deoxy-2'-fluoroadenosine-3'-phosphate
  modified_base 10: mod_base = OTHER; note = 2'-deoxy-2'-fluorocytidine-3'-phosphate
  modified_base 11: mod_base = OTHER; note = 2'-deoxy-2'-fluoroadenosine-3'-phosphate
  modified_base 12: mod_base = OTHER; note = 2'-O-methyluridine-3'-phosphate
  modified_base 13: mod_base = OTHER; note = 2'-O-methylcytidine-3'-phosphate
  modified_base 14: mod_base = OTHER; note = 2'-O-methyladenosine-3'-phosphate
  modified_base 15: mod_base = OTHER; note = 2'-O-methylcytidine-3'-phosphate
  modified_base 16: mod_base = OTHER; note = 2'-O-methylguanosine-3'-phosphate
  modified_base 17: mod_base = OTHER; note = 2'-O-methylcytidine-3'-phosphate
  modified_base 18: mod_base = OTHER; note = 2'-O-methyladenosine-3'-phosphate
  modified_base 19: mod_base = OTHER; note = 2'-O-methylcytidine-3'-phosphorothioate
  modified_base 20: mod_base = OTHER; note = 2'-O-methyluridine-3'-phosphorothioate
  modified_base 21: mod_base = OTHER; note = 2'-O-methyladenosine
gctggatgacatcacgcacta

SEQ ID NO: 3892 - RNA, 21 nt, synthetic construct
  source 1..21: mol_type = other RNA
  modified_base 1: mod_base = OTHER; note = 2'-O-methylcytidine-3'-phosphorothioate
  modified_base 2: mod_base = OTHER; note = 2'-O-methyluridine-3'-phosphorothioate
  modified_base 3: mod_base = OTHER; note = 2'-O-methylcytidine-3'-phosphate
  modified_base 4: mod_base = OTHER; note = 2'-O-methylcytidine-3'-phosphate
  modified_base 5: mod_base = OTHER; note = 2'-O-methyluridine-3'-phosphate
  modified_base 6: mod_base = OTHER; note = 2'-O-hexadecyl-uridine-3'-phosphate
  modified_base 7: mod_base = OTHER; note = 2'-deoxy-2'-fluorocytidine-3'-phosphate
  modified_base 8: mod_base = OTHER; note = 2'-O-methyladenosine-3'-phosphate
  modified_base 9: mod_base = OTHER; note = 2'-deoxy-2'-fluoroadenosine-3'-phosphate
  modified_base 10: mod_base = OTHER; note = 2'-deoxy-2'-fluorocytidine-3'-phosphate
  modified_base 11: mod_base = OTHER; note = 2'-deoxy-2'-fluoroadenosine-3'-phosphate
  modified_base 12: mod_base = OTHER; note = 2'-O-methylcytidine-3'-phosphate
  modified_base 13: mod_base = OTHER; note = 2'-O-methylcytidine-3'-phosphate
  modified_base 14: mod_base = OTHER; note = 2'-O-methyladenosine-3'-phosphate
  modified_base 15: mod_base = OTHER; note = 2'-O-methylcytidine-3'-phosphate
  modified_base 16: mod_base = OTHER; note = 2'-O-methylcytidine-3'-phosphate
  modified_base 17: mod_base = OTHER; note = 2'-O-methyluridine-3'-phosphate
  modified_base 18: mod_base = OTHER; note = 2'-O-methylguanosine-3'-phosphate
  modified_base 19: mod_base = OTHER; note = 2'-O-methylcytidine-3'-phosphorothioate
  modified_base 20: mod_base = OTHER; note = 2'-O-methyladenosine-3'-phosphorothioate
  modified_base 21: mod_base = OTHER; note = 2'-O-methyladenosine
ctccttcaacaccacctgcaa

SEQ ID NO: 3893 - RNA, 21 nt, synthetic construct
  source 1..21: mol_type = other RNA
  modified_base 1: mod_base = OTHER; note = 2'-O-methylcytidine-3'-phosphorothioate
  modified_base 2: mod_base = OTHER; note = 2'-O-methyluridine-3'-phosphorothioate
  modified_base 3: mod_base = OTHER; note = 2'-O-methyladenosine-3'-phosphate
  modified_base 4: mod_base = OTHER; note = 2'-O-methyluridine-3'-phosphate
  modified_base 5: mod_base = OTHER; note = 2'-O-methylguanosine-3'-phosphate
  modified_base 6: mod_base = OTHER; note = 2'-O-hexadecyl-guanosine-3'-phosphate
  modified_base 7: mod_base = OTHER; note = 2'-deoxy-2'-fluorocytidine-3'-phosphate
  modified_base 8: mod_base = OTHER; note = 2'-O-methyladenosine-3'-phosphate
  modified_base 9: mod_base = OTHER; note = 2'-deoxy-2'-fluoroguanosine-3'-phosphate
  modified_base 10: mod_base = OTHER; note = 2'-deoxy-2'-fluorouridine-3'-phosphate
  modified_base 11: mod_base = OTHER; note = 2'-deoxy-2'-fluoroguanosine-3'-phosphate
  modified_base 12: mod_base = OTHER; note = 2'-O-methylcytidine-3'-phosphate
  modified_base 13: mod_base = OTHER; note = 2'-O-methylcytidine-3'-phosphate
  modified_base 14: mod_base = OTHER; note = 2'-O-methyladenosine-3'-phosphate
  modified_base 15: mod_base = OTHER; note = 2'-O-methylguanosine-3'-phosphate
  modified_base 16: mod_base = OTHER; note = 2'-O-methylguanosine-3'-phosphate
  modified_base 17: mod_base = OTHER; note = 2'-O-methyladenosine-3'-phosphate
  modified_base 18: mod_base = OTHER; note = 2'-O-methylcytidine-3'-phosphate
  modified_base 19: mod_base = OTHER; note = 2'-O-methylcytidine-3'-phosphorothioate
  modified_base 20: mod_base = OTHER; note = 2'-O-methyluridine-3'-phosphorothioate
  modified_base 21: mod_base = OTHER; note = 2'-O-methyladenosine
ctatggcagtgccaggaccta

SEQ ID NO: 3894 - RNA, 21 nt, synthetic construct
  source 1..21: mol_type = other RNA
  modified_base 1: mod_base = OTHER; note = 2'-O-methyladenosine-3'-phosphorothioate
  modified_base 2: mod_base = OTHER; note = 2'-O-methylcytidine-3'-phosphorothioate
  modified_base 3: mod_base = OTHER; note = 2'-O-methylcytidine-3'-phosphate
  modified_base 4: mod_base = OTHER; note = 2'-O-methyluridine-3'-phosphate
  modified_base 5: mod_base = OTHER; note = 2'-O-methyladenosine-3'-phosphate
  modified_base 6: mod_base = OTHER; note = 2'-O-hexadecyl-uridine-3'-phosphate
  modified_base 7: mod_base = OTHER; note = 2'-deoxy-2'-fluoroguanosine-3'-phosphate
  modified_base 8: mod_base = OTHER; note = 2'-O-methyladenosine-3'-phosphate
  modified_base 9: mod_base = OTHER; note = 2'-deoxy-2'-fluorouridine-3'-phosphate
  modified_base 10: mod_base = OTHER; note = 2'-deoxy-2'-fluoroguanosine-3'-phosphate
  modified_base 11: mod_base = OTHER; note = 2'-deoxy-2'-fluoroadenosine-3'-phosphate
  modified_base 12: mod_base = OTHER; note = 2'-O-methylguanosine-3'-phosphate
  modified_base 13: mod_base = OTHER; note = 2'-O-methyladenosine-3'-phosphate
  modified_base 14: mod_base = OTHER; note = 2'-O-methyladenosine-3'-phosphate
  modified_base 15: mod_base = OTHER; note = 2'-O-methyladenosine-3'-phosphate
  modified_base 16: mod_base = OTHER; note = 2'-O-methylcytidine-3'-phosphate
  modified_base 17: mod_base = OTHER; note = 2'-O-methyluridine-3'-phosphate
  modified_base 18: mod_base = OTHER; note = 2'-O-methylcytidine-3'-phosphate
  modified_base 19: mod_base = OTHER; note = 2'-O-methyluridine-3'-phosphorothioate
  modified_base 20: mod_base = OTHER; note = 2'-O-methyladenosine-3'-phosphorothioate
  modified_base 21: mod_base = OTHER; note = 2'-O-methyladenosine
acctatgatgagaaactctaa

SEQ ID NO: 3895 - RNA, 21 nt, synthetic construct
  source 1..21: mol_type = other RNA
  modified_base 1: mod_base = OTHER; note = 2'-O-methyladenosine-3'-phosphorothioate
  modified_base 2: mod_base = OTHER; note = 2'-O-methylguanosine-3'-phosphorothioate
  modified_base 3: mod_base = OTHER; note = 2'-O-methylcytidine-3'-phosphate
  modified_base 4: mod_base = OTHER; note = 2'-O-methyluridine-3'-phosphate
  modified_base 5: mod_base = OTHER; note = 2'-O-methyladenosine-3'-phosphate
  modified_base 6: mod_base = OTHER; note = 2'-O-hexadecyl-cytidine-3'-phosphate
  modified_base 7: mod_base = OTHER; note = 2'-deoxy-2'-fluoroguanosine-3'-phosphate
  modified_base 8: mod_base = OTHER; note = 2'-O-methyluridine-3'-phosphate
  modified_base 9: mod_base = OTHER; note = 2'-deoxy-2'-fluorouridine-3'-phosphate
  modified_base 10: mod_base = OTHER; note = 2'-deoxy-2'-fluorocytidine-3'-phosphate
  modified_base 11: mod_base = OTHER; note = 2'-deoxy-2'-fluorouridine-3'-phosphate
  modified_base 12: mod_base = OTHER; note = 2'-O-methylguanosine-3'-phosphate
  modified_base 13: mod_base = OTHER; note = 2'-O-methyluridine-3'-phosphate
  modified_base 14: mod_base = OTHER; note = 2'-O-methylcytidine-3'-phosphate
  modified_base 15: mod_base = OTHER; note = 2'-O-methylcytidine-3'-phosphate
  modified_base 16: mod_base = OTHER; note = 2'-O-methyladenosine-3'-phosphate
  modified_base 17: mod_base = OTHER; note = 2'-O-methyladenosine-3'-phosphate
  modified_base 18: mod_base = OTHER; note = 2'-O-methylguanosine-3'-phosphate
  modified_base 19: mod_base = OTHER; note = 2'-O-methyladenosine-3'-phosphorothioate
  modified_base 20: mod_base = OTHER; note = 2'-O-methyladenosine-3'-phosphorothioate
  modified_base 21: mod_base = OTHER; note = 2'-O-methyladenosine
agctacgttctgtccaagaaa

SEQ ID NO: 3896 - RNA, 21 nt, synthetic construct
  source 1..21: mol_type = other RNA
  modified_base 1: mod_base = OTHER; note = 2'-O-methylguanosine-3'-phosphorothioate
  modified_base 2: mod_base = OTHER; note = 2'-O-methyladenosine-3'-phosphorothioate
  modified_base 3: mod_base = OTHER; note = 2'-O-methylcytidine-3'-phosphate
  modified_base 4: mod_base = OTHER; note = 2'-O-methyladenosine-3'-phosphate
  modified_base 5: mod_base = OTHER; note = 2'-O-methylguanosine-3'-phosphate
  modified_base 6: mod_base = OTHER; note = 2'-O-hexadecyl-cytidine-3'-phosphate
  modified_base 7: mod_base = OTHER; note = 2'-deoxy-2'-fluoroadenosine-3'-phosphate
  modified_base 8: mod_base = OTHER; note = 2'-O-methylguanosine-3'-phosphate
  modified_base 9: mod_base = OTHER; note = 2'-deoxy-2'-fluorocytidine-3'-phosphate
  modified_base 10: mod_base = OTHER; note = 2'-deoxy-2'-fluorouridine-3'-phosphate
  modified_base 11: mod_base = OTHER; note = 2'-deoxy-2'-fluorouridine-3'-phosphate
  modified_base 12: mod_base = OTHER; note = 2'-O-methylcytidine-3'-phosphate
  modified_base 13: mod_base = OTHER; note = 2'-O-methyladenosine-3'-phosphate
  modified_base 14: mod_base = OTHER; note = 2'-O-methylcytidine-3'-phosphate
  modified_base 15: mod_base = OTHER; note = 2'-O-methylcytidine-3'-phosphate
  modified_base 16: mod_base = OTHER; note = 2'-O-methylguanosine-3'-phosphate
  modified_base 17: mod_base = OTHER; note = 2'-O-methyluridine-3'-phosphate
  modified_base 18: mod_base = OTHER; note = 2'-O-methylguanosine-3'-phosphate
  modified_base 19: mod_base = OTHER; note = 2'-O-methylcytidine-3'-phosphorothioate
  modified_base 20: mod_base = OTHER; note = 2'-O-methyluridine-3'-phosphorothioate
  modified_base 21: mod_base = OTHER; note = 2'-O-methyladenosine
gacagcagcttcaccgtgcta

SEQ ID NO: 3897 - RNA, 21 nt, synthetic construct
  source 1..21: mol_type = other RNA
  modified_base 1: mod_base = OTHER; note = 2'-O-methylguanosine-3'-phosphorothioate
  modified_base 2: mod_base = OTHER; note = 2'-O-methylguanosine-3'-phosphorothioate
  modified_base 3: mod_base = OTHER; note = 2'-O-methyladenosine-3'-phosphate
  modified_base 4: mod_base = OTHER; note = 2'-O-methylcytidine-3'-phosphate
  modified_base 5: mod_base = OTHER; note = 2'-O-methyladenosine-3'-phosphate
  modified_base 6: mod_base = OTHER; note = 2'-O-hexadecyl-adenosine-3'-phosphate
  modified_base 7: mod_base = OTHER; note = 2'-deoxy-2'-fluorocytidine-3'-phosphate
  modified_base 8: mod_base = OTHER; note = 2'-O-methylguanosine-3'-phosphate
  modified_base 9: mod_base = OTHER; note = 2'-deoxy-2'-fluoroadenosine-3'-phosphate
  modified_base 10: mod_base = OTHER; note = 2'-deoxy-2'-fluoroguanosine-3'-phosphate
  modified_base 11: mod_base = OTHER; note = 2'-deoxy-2'-fluoroadenosine-3'-phosphate
  modified_base 12: mod_base = OTHER; note = 2'-O-methyladenosine-3'-phosphate
  modified_base 13: mod_base = OTHER; note = 2'-O-methylcytidine-3'-phosphate
  modified_base 14: mod_base = OTHER; note = 2'-O-methyluridine-3'-phosphate
  modified_base 15: mod_base = OTHER; note = 2'-O-methylguanosine-3'-phosphate
  modified_base 16: mod_base = OTHER; note = 2'-O-methylcytidine-3'-phosphate
  modified_base 17: mod_base = OTHER; note = 2'-O-methylcytidine-3'-phosphate
  modified_base 18: mod_base = OTHER; note = 2'-O-methyluridine-3'-phosphate
  modified_base 19: mod_base = OTHER; note = 2'-O-methylguanosine-3'-phosphorothioate
  modified_base 20: mod_base = OTHER; note = 2'-O-methyladenosine-3'-phosphorothioate
  modified_base 21: mod_base = OTHER; note = 2'-O-methyladenosine
ggacaacgagaactgcctgaa

SEQ ID NO: 3898 - RNA, 21 nt, synthetic construct
  source 1..21: mol_type = other RNA
  modified_base 1: mod_base = OTHER; note = 2'-O-methyluridine-3'-phosphorothioate
  modified_base 2: mod_base = OTHER; note = 2'-O-methylcytidine-3'-phosphorothioate
  modified_base 3: mod_base = OTHER; note = 2'-O-methylcytidine-3'-phosphate
  modified_base 4: mod_base = OTHER; note = 2'-O-methyluridine-3'-phosphate
  modified_base 5: mod_base = OTHER; note = 2'-O-methylcytidine-3'-phosphate
  modified_base 6: mod_base = OTHER; note = 2'-O-hexadecyl-adenosine-3'-phosphate
  modified_base 7: mod_base = OTHER; note = 2'-deoxy-2'-fluoroadenosine-3'-phosphate
  modified_base 8: mod_base = OTHER; note = 2'-O-methylcytidine-3'-phosphate
  modified_base 9: mod_base = OTHER; note = 2'-deoxy-2'-fluorouridine-3'-phosphate
  modified_base 10: mod_base = OTHER; note = 2'-deoxy-2'-fluorocytidine-3'-phosphate
  modified_base 11: mod_base = OTHER; note = 2'-deoxy-2'-fluorocytidine-3'-phosphate
  modified_base 12: mod_base = OTHER; note = 2'-O-methyladenosine-3'-phosphate
  modified_base 13: mod_base = OTHER; note = 2'-O-methyluridine-3'-phosphate
  modified_base 14: mod_base = OTHER; note = 2'-O-methylcytidine-3'-phosphate
  modified_base 15: mod_base = OTHER; note = 2'-O-methyluridine-3'-phosphate
  modified_base 16: mod_base = OTHER; note = 2'-O-methyladenosine-3'-phosphate
  modified_base 17: mod_base = OTHER; note = 2'-O-methylcytidine-3'-phosphate
  modified_base 18: mod_base = OTHER; note = 2'-O-methyladenosine-3'-phosphate
  modified_base 19: mod_base = OTHER; note = 2'-O-methylcytidine-3'-phosphorothioate
  modified_base 20: mod_base = OTHER; note = 2'-O-methylguanosine-3'-phosphorothioate
  modified_base 21: mod_base = OTHER; note = 2'-O-methyladenosine
tcctcaactccatctacacga

SEQ ID NO: 3899 - RNA, 21 nt, synthetic construct
  source 1..21: mol_type = other RNA
  modified_base 1: mod_base = OTHER; note = 2'-O-methylguanosine-3'-phosphorothioate
  modified_base 2: mod_base = OTHER; note = 2'-O-methylcytidine-3'-phosphorothioate
  modified_base 3: mod_base = OTHER; note = 2'-O-methylcytidine-3'-phosphate
  modified_base 4: mod_base = OTHER; note = 2'-O-methyladenosine-3'-phosphate
  modified_base 5: mod_base = OTHER; note = 2'-O-methyladenosine-3'-phosphate
  modified_base 6: mod_base = OTHER; note = 2'-O-hexadecyl-cytidine-3'-phosphate
  modified_base 7: mod_base = OTHER; note = 2'-deoxy-2'-fluoroadenosine-3'-phosphate
  modified_base 8: mod_base = OTHER; note = 2'-O-methyluridine-3'-phosphate
  modified_base 9: mod_base = OTHER; note = 2'-deoxy-2'-fluorocytidine-3'-phosphate
  modified_base 10: mod_base = OTHER; note = 2'-deoxy-2'-fluoroadenosine-3'-phosphate
  modified_base 11: mod_base = OTHER; note = 2'-deoxy-2'-fluorocytidine-3'-phosphate
  modified_base 12: mod_base = OTHER; note = 2'-O-methylcytidine-3'-phosphate
  modified_base 13: mod_base = OTHER; note = 2'-O-methylcytidine-3'-phosphate
  modified_base 14: mod_base = OTHER; note = 2'-O-methyluridine-3'-phosphate
  modified_base 15: mod_base = OTHER; note = 2'-O-methylguanosine-3'-phosphate
  modified_base 16: mod_base = OTHER; note = 2'-O-methyluridine-3'-phosphate
  modified_base 17: mod_base = OTHER; note = 2'-O-methyluridine-3'-phosphate
  modified_base 18: mod_base = OTHER; note = 2'-O-methylcytidine-3'-phosphate
  modified_base 19: mod_base = OTHER; note = 2'-O-methyladenosine-3'-phosphorothioate
  modified_base 20: mod_base = OTHER; note = 2'-O-methylcytidine-3'-phosphorothioate
  modified_base 21: mod_base = OTHER; note = 2'-O-methyladenosine
gccaacatcaccctgttcaca

SEQ ID NO: 3900 - RNA, 21 nt, synthetic construct
  source 1..21: mol_type = other RNA
  modified_base 1: mod_base = OTHER; note = 2'-O-methyluridine-3'-phosphorothioate
  modified_base 2: mod_base = OTHER; note = 2'-O-methylcytidine-3'-phosphorothioate
  modified_base 3: mod_base = OTHER; note = 2'-O-methylguanosine-3'-phosphate
  modified_base 4: mod_base = OTHER; note = 2'-O-methyladenosine-3'-phosphate
  modified_base 5: mod_base = OTHER; note = 2'-O-methylguanosine-3'-phosphate
  modified_base 6: mod_base = OTHER; note = 2'-O-hexadecyl-cytidine-3'-phosphate
  modified_base 7: mod_base = OTHER; note = 2'-deoxy-2'-fluorouridine-3'-phosphate
  modified_base 8: mod_base = OTHER; note = 2'-O-methyluridine-3'-phosphate
  modified_base 9: mod_base = OTHER; note = 2'-deoxy-2'-fluorocytidine-3'-phosphate
  modified_base 10: mod_base = OTHER; note = 2'-deoxy-2'-fluorouridine-3'-phosphate
  modified_base 11: mod_base = OTHER; note = 2'-deoxy-2'-fluorouridine-3'-phosphate
  modified_base 12: mod_base = OTHER; note = 2'-O-methylcytidine-3'-phosphate
  modified_base 13: mod_base = OTHER; note = 2'-O-methyladenosine-3'-phosphate
  modified_base 14: mod_base = OTHER; note = 2'-O-methyluridine-3'-phosphate
  modified_base 15: mod_base = OTHER; note = 2'-O-methylcytidine-3'-phosphate
  modified_base 16: mod_base = OTHER; note = 2'-O-methylguanosine-3'-phosphate
  modified_base 17: mod_base = OTHER; note = 2'-O-methyluridine-3'-phosphate
  modified_base 18: mod_base = OTHER; note = 2'-O-methylguanosine-3'-phosphate
  modified_base 19: mod_base = OTHER; note = 2'-O-methylguanosine-3'-phosphorothioate
  modified_base 20: mod_base = OTHER; note = 2'-O-methyluridine-3'-phosphorothioate
  modified_base 21: mod_base = OTHER; note = 2'-O-methyladenosine
tcgagcttcttcatcgtggta

SEQ ID NO: 3901 - RNA, 21 nt, synthetic construct
  source 1..21: mol_type = other RNA
  modified_base 1: mod_base = OTHER; note = 2'-O-methylguanosine-3'-phosphorothioate
  modified_base 2: mod_base = OTHER; note = 2'-O-methylcytidine-3'-phosphorothioate
  modified_base 3: mod_base = OTHER; note = 2'-O-methylcytidine-3'-phosphate
  modified_base 4: mod_base = OTHER; note = 2'-O-methyladenosine-3'-phosphate
  modified_base 5: mod_base = OTHER; note = 2'-O-methylcytidine-3'-phosphate
  modified_base 6: mod_base = OTHER; note = 2'-O-hexadecyl-uridine-3'-phosphate
  modified_base 7: mod_base = OTHER; note = 2'-deoxy-2'-fluorocytidine-3'-phosphate
  modified_base 8: mod_base = OTHER; note = 2'-O-methyladenosine-3'-phosphate
  modified_base 9: mod_base = OTHER; note = 2'-deoxy-2'-fluorouridine-3'-phosphate
  modified_base 10: mod_base = OTHER; note = 2'-deoxy-2'-fluoroguanosine-3'-phosphate
  modified_base 11: mod_base = OTHER; note = 2'-deoxy-2'-fluorocytidine-3'-phosphate
  modified_base 12: mod_base = OTHER; note = 2'-O-methyladenosine-3'-phosphate
  modified_base 13: mod_base = OTHER; note = 2'-O-methylguanosine-3'-phosphate
  modified_base 14: mod_base = OTHER; note = 2'-O-methylguanosine-3'-phosphate
  modified_base 15: mod_base = OTHER; note = 2'-O-methyluridine-3'-phosphate
  modified_base 16: mod_base = OTHER; note = 2'-O-methylguanosine-3'-phosphate
  modified_base 17: mod_base = OTHER; note = 2'-O-methyluridine-3'-phosphate
  modified_base 18: mod_base = OTHER; note = 2'-O-methyluridine-3'-phosphate
  modified_base 19: mod_base = OTHER; note = 2'-O-methyluridine-3'-phosphorothioate
  modified_base 20: mod_base = OTHER; note = 2'-O-methylguanosine-3'-phosphorothioate
  modified_base 21: mod_base = OTHER; note = 2'-O-methyladenosine
gccactcatgcaggtgtttga

SEQ ID NO: 3902 - RNA, 21 nt, synthetic construct
  source 1..21: mol_type = other RNA
  modified_base 1: mod_base = OTHER; note = 2'-O-methylguanosine-3'-phosphorothioate
  modified_base 2: mod_base = OTHER; note = 2'-O-methylguanosine-3'-phosphorothioate
  modified_base 3: mod_base = OTHER; note = 2'-O-methylguanosine-3'-phosphate
  modified_base 4: mod_base = OTHER; note = 2'-O-methyladenosine-3'-phosphate
  modified_base 5: mod_base = OTHER; note = 2'-O-methyladenosine-3'-phosphate
  modified_base 6: mod_base = OTHER; note = 2'-O-hexadecyl-cytidine-3'-phosphate
  modified_base 7: mod_base = OTHER; note = 2'-deoxy-2'-fluorouridine-3'-phosphate
  modified_base 8: mod_base = OTHER; note = 2'-O-methyluridine-3'-phosphate
  modified_base 9: mod_base = OTHER; note = 2'-deoxy-2'-fluorocytidine-3'-phosphate
  modified_base 10: mod_base = OTHER; note = 2'-deoxy-2'-fluoroadenosine-3'-phosphate
  modified_base 11: mod_base = OTHER; note = 2'-deoxy-2'-fluoroadenosine-3'-phosphate
  modified_base 12: mod_base = OTHER; note = 2'-O-methylcytidine-3'-phosphate
  modified_base 13: mod_base = OTHER; note = 2'-O-methylcytidine-3'-phosphate
  modified_base 14: mod_base = OTHER; note = 2'-O-methyladenosine-3'-phosphate
  modified_base 15: mod_base = OTHER; note = 2'-O-methylguanosine-3'-phosphate
  modified_base 16: mod_base = OTHER; note = 2'-O-methyladenosine-3'-phosphate
  modified_base 17: mod_base = OTHER; note = 2'-O-methyladenosine-3'-phosphate
  modified_base 18: mod_base = OTHER; note = 2'-O-methylcytidine-3'-phosphate
  modified_base 19: mod_base = OTHER; note = 2'-O-methylcytidine-3'-phosphorothioate
  modified_base 20: mod_base = OTHER; note = 2'-O-methyladenosine-3'-phosphorothioate
  modified_base 21: mod_base = OTHER; note = 2'-O-methyladenosine
gggaacttcaaccagaaccaa

SEQ ID NO: 3903 - RNA, 21 nt, synthetic construct
  source 1..21: mol_type = other RNA
  modified_base 1: mod_base = OTHER; note = 2'-O-methyluridine-3'-phosphorothioate
  modified_base 2: mod_base = OTHER; note = 2'-O-methylguanosine-3'-phosphorothioate
  modified_base 3: mod_base = OTHER; note = 2'-O-methyladenosine-3'-phosphate
  modified_base 4: mod_base = OTHER; note = 2'-O-methylcytidine-3'-phosphate
  modified_base 5: mod_base = OTHER; note = 2'-O-methylguanosine-3'-phosphate
  modified_base 6: mod_base = OTHER; note = 2'-O-hexadecyl-adenosine-3'-phosphate
  modified_base 7: mod_base = OTHER; note = 2'-deoxy-2'-fluorocytidine-3'-phosphate
  modified_base 8: mod_base = OTHER; note = 2'-O-methyluridine-3'-phosphate
  modified_base 9: mod_base = OTHER; note = 2'-deoxy-2'-fluorouridine-3'-phosphate
  modified_base 10: mod_base = OTHER; note = 2'-deoxy-2'-fluorocytidine-3'-phosphate
  modified_base 11: mod_base = OTHER; note = 2'-deoxy-2'-fluoroadenosine-3'-phosphate
  modified_base 12: mod_base = OTHER; note = 2'-O-methylcytidine-3'-phosphate
  modified_base 13: mod_base = OTHER; note = 2'-O-methylguanosine-3'-phosphate
  modified_base 14: mod_base = OTHER; note = 2'-O-methylguanosine-3'-phosphate
  modified_base 15: mod_base = OTHER; note = 2'-O-methylcytidine-3'-phosphate
  modified_base 16: mod_base = OTHER; note = 2'-O-methylcytidine-3'-phosphate
  modified_base 17: mod_base = OTHER; note = 2'-O-methylcytidine-3'-phosphate
  modified_base 18: mod_base = OTHER; note = 2'-O-methyluridine-3'-phosphate
  modified_base 19: mod_base = OTHER; note = 2'-O-methylcytidine-3'-phosphorothioate
  modified_base 20: mod_base = OTHER; note = 2'-O-methyladenosine-3'-phosphorothioate
  modified_base 21: mod_base = OTHER; note = 2'-O-methyladenosine
tgacgacttcacggccctcaa

SEQ ID NO: 3904 - RNA, 21 nt, synthetic construct
  source 1..21: mol_type = other RNA
  modified_base 1: mod_base = OTHER; note = 2'-O-methyladenosine-3'-phosphorothioate
  modified_base 2: mod_base = OTHER; note = 2'-O-methylguanosine-3'-phosphorothioate
  modified_base 3: mod_base = OTHER; note = 2'-O-methylcytidine-3'-phosphate
  modified_base 4: mod_base = OTHER; note = 2'-O-methylcytidine-3'-phosphate
  modified_base 5: mod_base = OTHER; note = 2'-O-methyluridine-3'-phosphate
  modified_base 6: mod_base = OTHER; note = 2'-O-hexadecyl-uridine-3'-phosphate
  modified_base 7: mod_base = OTHER; note = 2'-deoxy-2'-fluorocytidine-3'-phosphate
  modified_base 8: mod_base = OTHER; note = 2'-O-methylguanosine-3'-phosphate
  modified_base 9: mod_base = OTHER; note = 2'-deoxy-2'-fluorocytidine-3'-phosphate
  modified_base 10: mod_base = OTHER; note = 2'-deoxy-2'-fluorocytidine-3'-phosphate
  modified_base 11: mod_base = OTHER; note = 2'-deoxy-2'-fluoroadenosine-3'-phosphate
  modified_base 12: mod_base = OTHER; note = 2'-O-methyladenosine-3'-phosphate
  modified_base 13: mod_base = OTHER; note = 2'-O-methylcytidine-3'-phosphate
  modified_base 14: mod_base = OTHER; note = 2'-O-methyladenosine-3'-phosphate
  modified_base 15: mod_base = OTHER; note = 2'-O-methylcytidine-3'-phosphate
  modified_base 16: mod_base = OTHER; note = 2'-O-methylcytidine-3'-phosphate
  modified_base 17: mod_base = OTHER; note = 2'-O-methyluridine-3'-phosphate
  modified_base 18: mod_base = OTHER; note = 2'-O-methylguanosine-3'-phosphate
  modified_base 19: mod_base = OTHER; note = 2'-O-methylguanosine-3'-phosphorothioate
  modified_base 20: mod_base = OTHER; note = 2'-O-methyladenosine-3'-phosphorothioate
  modified_base 21: mod_base = OTHER; note = 2'-O-methyladenosine
agccttcgccaacacctggaa

SEQ ID NO: 3905 - RNA, 21 nt, synthetic construct
  source 1..21: mol_type = other RNA
  modified_base 1: mod_base = OTHER; note = 2'-O-methylcytidine-3'-phosphorothioate
  modified_base 2: mod_base = OTHER; note = 2'-O-methylcytidine-3'-phosphorothioate
  modified_base 3: mod_base = OTHER; note = 2'-O-methyladenosine-3'-phosphate
  modified_base 4: mod_base = OTHER; note = 2'-O-methylguanosine-3'-phosphate
  modified_base 5: mod_base = OTHER; note = 2'-O-methylguanosine-3'-phosphate
  modified_base 6: mod_base = OTHER; note = 2'-O-hexadecyl-adenosine-3'-phosphate
  modified_base 7: mod_base = OTHER; note = 2'-deoxy-2'-fluoroadenosine-3'-phosphate
  modified_base 8: mod_base = OTHER; note = 2'-O-methylcytidine-3'-phosphate
  modified_base 9: mod_base = OTHER; note = 2'-deoxy-2'-fluoroadenosine-3'-phosphate
  modified_base 10: mod_base = OTHER; note = 2'-deoxy-2'-fluoroguanosine-3'-phosphate
  modified_base 11: mod_base = OTHER; note = 2'-deoxy-2'-fluorocytidine-3'-phosphate
  modified_base 12: mod_base = OTHER; note = 2'-O-methyluridine-3'-phosphate
  modified_base 13: mod_base = OTHER; note = 2'-O-methyluridine-3'-phosphate
  modified_base 14: mod_base = OTHER; note = 2'-O-methyluridine-3'-phosphate
  modified_base 15: mod_base = OTHER; note = 2'-O-methylguanosine-3'-phosphate
  modified_base 16: mod_base = OTHER; note = 2'-O-methyladenosine-3'-phosphate
  modified_base 17: mod_base = OTHER; note = 2'-O-methylguanosine-3'-phosphate
  modified_base 18: mod_base = OTHER; note = 2'-O-methylguanosine-3'-phosphate
  modified_base 19: mod_base = OTHER; note = 2'-O-methyladenosine-3'-phosphorothioate
  modified_base 20: mod_base = OTHER; note = 2'-O-methylcytidine-3'-phosphorothioate
  modified_base 21: mod_base = OTHER; note = 2'-O-methyladenosine
ccaggaacagctttgaggaca

SEQ ID NO: 3906 - RNA, 21 nt, synthetic construct
  source 1..21: mol_type = other RNA
  modified_base 1: mod_base = OTHER; note = 2'-O-methylguanosine-3'-phosphorothioate
  modified_base 2: mod_base = OTHER; note = 2'-O-methyluridine-3'-phosphorothioate
  modified_base 3: mod_base = OTHER; note = 2'-O-methylguanosine-3'-phosphate
  modified_base 4: mod_base = OTHER; note = 2'-O-methylguanosine-3'-phosphate
  modified_base 5: mod_base = OTHER; note = 2'-O-methyladenosine-3'-phosphate
  modified_base 6: mod_base = OTHER; note = 2'-O-hexadecyl-guanosine-3'-phosphate
  modified_base 7: mod_base = OTHER; note = 2'-deoxy-2'-fluoroadenosine-3'-phosphate
  modified_base 8: mod_base = OTHER; note = 2'-O-methyladenosine-3'-phosphate
  modified_base 9: mod_base = OTHER; note = 2'-deoxy-2'-fluorouridine-3'-phosphate
  modified_base 10: mod_base = OTHER; note = 2'-deoxy-2'-fluoroguanosine-3'-phosphate
  modified_base 11: mod_base = OTHER; note = 2'-deoxy-2'-fluoroadenosine-3'-phosphate
  modified_base 12: mod_base = OTHER; note = 2'-O-methylguanosine-3'-phosphate
  modified_base 13: mod_base = OTHER; note = 2'-O-methyladenosine-3'-phosphate
  modified_base 14: mod_base = OTHER; note = 2'-O-methyladenosine-3'-phosphate
  modified_base 15: mod_base = OTHER; note = 2'-O-methylcytidine-3'-phosphate
  modified_base 16: mod_base = OTHER; note = 2'-O-methyluridine-3'-phosphate
  modified_base 17: mod_base = OTHER; note = 2'-O-methyladenosine-3'-phosphate
  modified_base 18: mod_base = OTHER; note = 2'-O-methylcytidine-3'-phosphate
  modified_base 19: mod_base = OTHER; note = 2'-O-methylguanosine-3'-phosphorothioate
  modified_base 20: mod_base = OTHER; note = 2'-O-methylcytidine-3'-phosphorothioate
  modified_base 21: mod_base = OTHER; note = 2'-O-methyladenosine
gtggagaatgagaactacgca

SEQ ID NO: 3907 - RNA, 21 nt, synthetic construct
  source 1..21: mol_type = other RNA
  modified_base 1: mod_base = OTHER; note = 2'-O-methylcytidine-3'-phosphorothioate
  modified_base 2: mod_base = OTHER; note = 2'-O-methyladenosine-3'-phosphorothioate
  modified_base 3: mod_base = OTHER; note = 2'-O-methyladenosine-3'-phosphate
  modified_base 4: mod_base = OTHER; note = 2'-O-methylcytidine-3'-phosphate
  modified_base 5: mod_base = OTHER; note = 2'-O-methyladenosine-3'-phosphate
  modified_base 6: mod_base = OTHER; note = 2'-O-hexadecyl-guanosine-3'-phosphate
  modified_base 7: mod_base = OTHER; note = 2'-deoxy-2'-fluorouridine-3'-phosphate
  modified_base 8: mod_base = OTHER; note = 2'-O-methylguanosine-3'-phosphate
  modified_base 9: mod_base = OTHER; note = 2'-deoxy-2'-fluorocytidine-3'-phosphate
  modified_base 10: mod_base = OTHER; note = 2'-deoxy-2'-fluorocytidine-3'-phosphate
  modified_base 11: mod_base = OTHER; note = 2'-deoxy-2'-fluorouridine-3'-phosphate
  modified_base 12: mod_base = OTHER; note = 2'-O-methyluridine-3'-phosphate
  modified_base 13: mod_base = OTHER; note = 2'-O-methylcytidine-3'-phosphate
  modified_base 14: mod_base = OTHER; note = 2'-O-methyluridine-3'-phosphate
  modified_base 15: mod_base = OTHER; note = 2'-O-methylcytidine-3'-phosphate
  modified_base 16: mod_base = OTHER; note = 2'-O-methylguanosine-3'-phosphate
  modified_base 17: mod_base = OTHER; note = 2'-O-methylcytidine-3'-phosphate
  modified_base 18: mod_base = OTHER; note = 2'-O-methylguanosine-3'-phosphate
  modified_base 19: mod_base = OTHER; note = 2'-O-methylcytidine-3'-phosphorothioate
  modified_base 20: mod_base = OTHER; note = 2'-O-methyluridine-3'-phosphorothioate
  modified_base 21: mod_base = OTHER; note = 2'-O-methyladenosine
caacagtgccttctcgcgcta

SEQ ID NO: 3908 - RNA, 21 nt, synthetic construct
  source 1..21: mol_type = other RNA
  modified_base 1: mod_base = OTHER; note = 2'-O-methylcytidine-3'-phosphorothioate
  modified_base 2: mod_base = OTHER; note = 2'-O-methyluridine-3'-phosphorothioate
  modified_base 3: mod_base = OTHER; note = 2'-O-methyluridine-3'-phosphate
  modified_base 4: mod_base = OTHER; note = 2'-O-methylcytidine-3'-phosphate
  modified_base 5: mod_base = OTHER; note = 2'-O-methylcytidine-3'-phosphate
  modified_base 6: mod_base = OTHER; note = 2'-O-hexadecyl-adenosine-3'-phosphate
  modified_base 7: mod_base = OTHER; note = 2'-deoxy-2'-fluorocytidine-3'-phosphate
  modified_base 8: mod_base = OTHER; note = 2'-O-methyluridine-3'-phosphate
  modified_base 9: mod_base = OTHER; note = 2'-deoxy-2'-fluorocytidine-3'-phosphate
  modified_base 10: mod_base = OTHER; note = 2'-deoxy-2'-fluoroguanosine-3'-phosphate
  modified_base 11: mod_base = OTHER; note = 2'-deoxy-2'-fluoroadenosine-3'-phosphate
  modified_base 12: mod_base = OTHER; note = 2'-O-methyladenosine-3'-phosphate
  modified_base 13: mod_base = OTHER; note = 2'-O-methylcytidine-3'-phosphate
  modified_base 14: mod_base = OTHER; note = 2'-O-methyluridine-3'-phosphate
  modified_base 15: mod_base = OTHER; note = 2'-O-methylguanosine-3'-phosphate
  modified_base 16: mod_base = OTHER; note = 2'-O-methylcytidine-3'-phosphate
  modified_base 17: mod_base = OTHER; note = 2'-O-methyladenosine-3'-phosphate
  modified_base 18: mod_base = OTHER; note = 2'-O-methyluridine-3'-phosphate
  modified_base 19: mod_base = OTHER; note = 2'-O-methylguanosine-3'-phosphorothioate
  modified_base 20: mod_base = OTHER; note = 2'-O-methyluridine-3'-phosphorothioate
  modified_base 21: mod_base = OTHER; note = 2'-O-methyladenosine
cttccactcgaactgcatgta

SEQ ID NO: 3909 - RNA, 21 nt, synthetic construct
  source 1..21: mol_type = other RNA
  modified_base 1: mod_base = OTHER; note = 2'-O-methylcytidine-3'-phosphorothioate
  modified_base 2: mod_base = OTHER; note = 2'-O-methyladenosine-3'-phosphorothioate
  modified_base 3: mod_base = OTHER; note = 2'-O-methylcytidine-3'-phosphate
  modified_base 4: mod_base = OTHER; note = 2'-O-methylcytidine-3'-phosphate
  modified_base 5: mod_base = OTHER; note = 2'-O-methyluridine-3'-phosphate
  modified_base 6: mod_base = OTHER; note = 2'-O-hexadecyl-guanosine-3'-phosphate
  modified_base 7: mod_base = OTHER; note = 2'-deoxy-2'-fluorocytidine-3'-phosphate
  modified_base 8: mod_base = OTHER; note = 2'-O-methyladenosine-3'-phosphate
  modified_base 9: mod_base = OTHER; note = 2'-deoxy-2'-fluoroadenosine-3'-phosphate
  modified_base 10: mod_base = OTHER; note = 2'-deoxy-2'-fluorocytidine-3'-phosphate
  modified_base 11: mod_base = OTHER; note = 2'-deoxy-2'-fluorouridine-3'-phosphate
  modified_base 12: mod_base = OTHER; note = 2'-O-methylguanosine-3'-phosphate
  modified_base 13: mod_base = OTHER; note = 2'-O-methyluridine-3'-phosphate
  modified_base 14: mod_base = OTHER; note = 2'-O-methylguanosine-3'-phosphate
  modified_base 15: mod_base = OTHER; note = 2'-O-methyladenosine-3'-phosphate
  modified_base 16: mod_base = OTHER; note = 2'-O-methylguanosine-3'-phosphate
  modified_base 17: mod_base = OTHER; note = 2'-O-methylcytidine-3'-phosphate
  modified_base 18: mod_base = OTHER; note = 2'-O-methylguanosine-3'-phosphate
  modified_base 19: mod_base = OTHER; note = 2'-O-methylguanosine-3'-phosphorothioate
  modified_base 20: mod_base = OTHER; note = 2'-O-methyladenosine-3'-phosphorothioate
  modified_base 21: mod_base = OTHER; note = 2'-O-methyladenosine
cacctgcaactgtgagcggaa

SEQ ID NO: 3910 - RNA, 21 nt, synthetic construct
  source 1..21: mol_type = other RNA
  modified_base 1: mod_base = OTHER; note = 2'-O-methylcytidine-3'-phosphorothioate
  modified_base 2: mod_base = OTHER; note = 2'-O-methylcytidine-3'-phosphorothioate
  modified_base 3: mod_base = OTHER; note = 2'-O-methyluridine-3'-phosphate
  modified_base 4: mod_base = OTHER; note = 2'-O-methylcytidine-3'-phosphate
  modified_base 5: mod_base = OTHER; note = 2'-O-methylcytidine-3'-phosphate
  modified_base 6: mod_base = OTHER; note = 2'-O-hexadecyl-uridine-3'-phosphate
  modified_base 7: mod_base = OTHER; note = 2'-deoxy-2'-fluoroadenosine-3'-phosphate
  modified_base 8: mod_base = OTHER; note = 2'-O-methyluridine-3'-phosphate
  modified_base 9: mod_base = OTHER; note = 2'-deoxy-2'-fluoroguanosine-3'-phosphate
  modified_base 10: mod_base = OTHER; note = 2'-deoxy-2'-fluorouridine-3'-phosphate
  modified_base 11: mod_base = OTHER; note = 2'-deoxy-2'-fluoroguanosine-3'-phosphate
  modified_base 12: mod_base = OTHER; note = 2'-O-methylcytidine-3'-phosphate
  modified_base 13: mod_base = OTHER; note = 2'-O-methyladenosine-3'-phosphate
  modified_base 14: mod_base = OTHER; note = 2'-O-methylcytidine-3'-phosphate
  modified_base 15: mod_base = OTHER; note = 2'-O-methylguanosine-3'-phosphate
  modified_base 16: mod_base = OTHER; note = 2'-O-methylcytidine-3'-phosphate
  modified_base 17: mod_base = OTHER; note = 2'-O-methylcytidine-3'-phosphate
  modified_base 18: mod_base = OTHER; note = 2'-O-methyluridine-3'-phosphate
  modified_base 19: mod_base = OTHER; note = 2'-O-methylguanosine-3'-phosphorothioate
  modified_base 20: mod_base = OTHER; note = 2'-O-methyluridine-3'-phosphorothioate
  modified_base 21: mod_base = OTHER; note = 2'-O-methyladenosine
cctcctatgtgcacgcctgta

SEQ ID NO: 3911 - RNA, 21 nt, synthetic construct
  source 1..21: mol_type = other RNA
  modified_base 1: mod_base = OTHER; note = 2'-O-methylguanosine-3'-phosphorothioate
  modified_base 2: mod_base = OTHER; note = 2'-O-methylguanosine-3'-phosphorothioate
  modified_base 3: mod_base = OTHER; note = 2'-O-methylcytidine-3'-phosphate
  modified_base 4: mod_base = OTHER; note = 2'-O-methylguanosine-3'-phosphate
  modified_base 5: mod_base = OTHER; note = 2'-O-methyluridine-3'-phosphate
  modified_base 6: mod_base = OTHER; note = 2'-O-hexadecyl-adenosine-3'-phosphate
  modified_base 7: mod_base = OTHER; note = 2'-deoxy-2'-fluorocytidine-3'-phosphate
  modified_base 8: mod_base = OTHER; note = 2'-O-methyladenosine-3'-phosphate
  modified_base 9: mod_base = OTHER; note = 2'-deoxy-2'-fluoroguanosine-3'-phosphate
  modified_base 10: mod_base = OTHER; note = 2'-deoxy-2'-fluorocytidine-3'-phosphate
  modified_base 11: mod_base = OTHER; note = 2'-deoxy-2'-fluorouridine-3'-phosphate
  modified_base 12: mod_base = OTHER; note = 2'-O-methylcytidine-3'-phosphate
  modified_base 13: mod_base = OTHER; note = 2'-O-methyladenosine-3'-phosphate
  modified_base 14: mod_base = OTHER; note = 2'-O-methylguanosine-3'-phosphate
  modified_base 15: mod_base = OTHER; note = 2'-O-methylcytidine-3'-phosphate
  modified_base 16: mod_base = OTHER; note = 2'-O-methylguanosine-3'-phosphate
  modified_base 17: mod_base = OTHER; note = 2'-O-methyladenosine-3'-phosphate
  modified_base 18: mod_base = OTHER; note = 2'-O-methylcytidine-3'-phosphate
  modified_base 19: mod_base = OTHER; note = 2'-O-methyluridine-3'-phosphorothioate
  modified_base 20: mod_base = OTHER; note = 2'-O-methylguanosine-3'-phosphorothioate
  modified_base 21: mod_base = OTHER; note = 2'-O-methyladenosine
ggcgtacagctcagcgactga

SEQ ID NO: 3912 - RNA, 21 nt, synthetic construct
  source 1..21: mol_type = other RNA
  modified_base 1: mod_base = OTHER; note = 2'-O-methyladenosine-3'-phosphorothioate
  modified_base 2: mod_base = OTHER; note = 2'-O-methylcytidine-3'-phosphorothioate
  modified_base 3: mod_base = OTHER; note = 2'-O-methylcytidine-3'-phosphate
  modified_base 4: mod_base = OTHER; note = 2'-O-methyladenosine-3'-phosphate
  modified_base 5: mod_base = OTHER; note = 2'-O-methyladenosine-3'-phosphate
  modified_base 6: mod_base = OTHER; note = 2'-O-hexadecyl-guanosine-3'-phosphate
  modified_base 7: mod_base = OTHER; note = 2'-deoxy-2'-fluorouridine-3'-phosphate
  modified_base 8: mod_base = OTHER; note = 2'-O-methyladenosine-3'-phosphate
  modified_base 9: mod_base = OTHER; note = 2'-deoxy-2'-fluorocytidine-3'-phosphate
  modified_base 10: mod_base = OTHER; note = 2'-deoxy-2'-fluoroadenosine-3'-phosphate
  modified_base 11: mod_base = OTHER; note = 2'-deoxy-2'-fluorouridine-3'-phosphate
  modified_base 12: mod_base = OTHER; note = 2'-O-methylguanosine-3'-phosphate
  modified_base 13: mod_base = OTHER; note = 2'-O-methylcytidine-3'-phosphate
  modified_base 14: mod_base = OTHER; note = 2'-O-methyladenosine-3'-phosphate
  modified_base 15: mod_base = OTHER; note = 2'-O-methylguanosine-3'-phosphate
  modified_base 16: mod_base = OTHER; note = 2'-O-methyladenosine-3'-phosphate
  modified_base 17: mod_base = OTHER; note = 2'-O-methyladenosine-3'-phosphate
  modified_base 18: mod_base = OTHER; note = 2'-O-methylcytidine-3'-phosphate
  modified_base 19: mod_base = OTHER; note = 2'-O-methyluridine-3'-phosphorothioate
  modified_base 20: mod_base = OTHER; note = 2'-O-methylguanosine-3'-phosphorothioate
  modified_base 21: mod_base = OTHER; note = 2'-O-methyladenosine
accaagtacatgcagaactga

SEQ ID NO: 3913 - RNA, 21 nt, synthetic construct
  source 1..21: mol_type = other RNA
  modified_base 1: mod_base = OTHER; note = 2'-O-methyluridine-3'-phosphorothioate
  modified_base 2: mod_base = OTHER; note = 2'-O-methyladenosine-3'-phosphorothioate
  modified_base 3: mod_base = OTHER; note = 2'-O-methylcytidine-3'-phosphate
  modified_base 4: mod_base = OTHER; note = 2'-O-methylguanosine-3'-phosphate
  modified_base 5: mod_base = OTHER; note = 2'-O-methylcytidine-3'-phosphate
  modified_base 6: mod_base = OTHER; note = 2'-O-hexadecyl-cytidine-3'-phosphate
  modified_base 7: mod_base = OTHER; note = 2'-deoxy-2'-fluorouridine-3'-phosphate
  modified_base 8: mod_base = OTHER; note = 2'-O-methyladenosine-3'-phosphate
  modified_base 9: mod_base = OTHER; note = 2'-deoxy-2'-fluorocytidine-3'-phosphate
  modified_base 10: mod_base = OTHER; note = 2'-deoxy-2'-fluoroguanosine-3'-phosphate
  modified_base 11: mod_base = OTHER; note = 2'-deoxy-2'-fluorouridine-3'-phosphate
  modified_base 12: mod_base = OTHER; note = 2'-O-methylguanosine-3'-phosphate
  modified_base 13: mod_base = OTHER; note = 2'-O-methylguanosine-3'-phosphate
  modified_base 14: mod_base = OTHER; note = 2'-O-methyluridine-3'-phosphate
  modified_base 15: mod_base = OTHER; note = 2'-O-methylguanosine-3'-phosphate
  modified_base 16: mod_base = OTHER; note = 2'-O-methylguanosine-3'-phosphate
  modified_base 17: mod_base = OTHER; note = 2'-O-methyladenosine-3'-phosphate
  modified_base 18: mod_base = OTHER; note = 2'-O-methyluridine-3'-phosphate
  modified_base 19: mod_base = OTHER; note = 2'-O-methylguanosine-3'-phosphorothioate
  modified_base 20: mod_base = OTHER; note = 2'-O-methylcytidine-3'-phosphorothioate
  modified_base 21: mod_base = OTHER; note = 2'-O-methyladenosine
tacgcctacgtggtggatgca

SEQ ID NO: 3914 - RNA, 21 nt, synthetic construct
  source 1..21: mol_type = other RNA
  modified_base 1: mod_base = OTHER; note = 2'-O-methylguanosine-3'-phosphorothioate
  modified_base 2: mod_base = OTHER; note = 2'-O-methylcytidine-3'-phosphorothioate
  modified_base 3: mod_base = OTHER; note = 2'-O-methyladenosine-3'-phosphate
  modified_base 4: mod_base = OTHER; note = 2'-O-methylguanosine-3'-phosphate
  modified_base 5: mod_base = OTHER; note = 2'-O-methylcytidine-3'-phosphate
  modified_base 6: mod_base = OTHER; note = 2'-O-hexadecyl-guanosine-3'-phosphate
  modified_base 7: mod_base = OTHER; note = 2'-deoxy-2'-fluorouridine-3'-phosphate
  modified_base 8: mod_base = OTHER; note = 2'-O-methyluridine-3'-phosphate
  modified_base 9: mod_base = OTHER; note = 2'-deoxy-2'-fluorouridine-3'-phosphate
  modified_base 10: mod_base = OTHER; note = 2'-deoxy-2'-fluorocytidine-3'-phosphate
  modified_base 11: mod_base = OTHER; note = 2'-deoxy-2'-fluorocytidine-3'-phosphate
  modified_base 12: mod_base = OTHER; note = 2'-O-methyluridine-3'-phosphate
  modified_base 13: mod_base = OTHER; note = 2'-O-methyluridine-3'-phosphate
  modified_base 14: mod_base = OTHER; note = 2'-O-methylcytidine-3'-phosphate
  modified_base 15: mod_base = OTHER; note = 2'-O-methylguanosine-3'-phosphate
  modified_base 16: mod_base = OTHER; note = 2'-O-methyluridine-3'-phosphate
  modified_base 17: mod_base = OTHER; note = 2'-O-methylguanosine-3'-phosphate
  modified_base 18: mod_base = OTHER; note = 2'-O-methylcytidine-3'-phosphate
  modified_base 19: mod_base = OTHER; note = 2'-O-methylcytidine-3'-phosphorothioate
  modified_base 20: mod_base = OTHER; note = 2'-O-methyluridine-3'-phosphorothioate
  modified_base 21: mod_base = OTHER; note = 2'-O-methyladenosine
gcagcgtttccttcgtgccta

SEQ ID NO: 3915 - RNA, 21 nt, synthetic construct
  source 1..21: mol_type = other RNA
  modified_base 1: mod_base = OTHER; note = 2'-O-methylguanosine-3'-phosphorothioate
  modified_base 2: mod_base = OTHER; note = 2'-O-methylcytidine-3'-phosphorothioate
  modified_base 3: mod_base = OTHER; note = 2'-O-methyladenosine-3'-phosphate
  modified_base 4: mod_base = OTHER; note = 2'-O-methylcytidine-3'-phosphate
  modified_base 5: mod_base = OTHER; note = 2'-O-methylcytidine-3'-phosphate
  modified_base 6: mod_base = OTHER; note = 2'-O-hexadecyl-uridine-3'-phosphate
  modified_base 7: mod_base = OTHER; note = 2'-deoxy-2'-fluorouridine-3'-phosphate
  modified_base 8: mod_base = OTHER; note = 2'-O-methylcytidine-3'-phosphate
  modified_base 9: mod_base = OTHER; note = 2'-deoxy-2'-fluorocytidine-3'-phosphate
  modified_base 10: mod_base = OTHER; note = 2'-deoxy-2'-fluorouridine-3'-phosphate
  modified_base 11: mod_base = OTHER; note = 2'-deoxy-2'-fluorocytidine-3'-phosphate
  modified_base 12: mod_base = OTHER; note = 2'-O-methyladenosine-3'-phosphate
  modified_base 13: mod_base = OTHER; note = 2'-O-methyladenosine-3'-phosphate
  modified_base 14: mod_base = OTHER; note = 2'-O-methyluridine-3'-phosphate
  modified_base 15: mod_base = OTHER; note = 2'-O-methylguanosine-3'-phosphate
  modified_base 16: mod_base = OTHER; note = 2'-O-methyladenosine-3'-phosphate
  modified_base 17: mod_base = OTHER; note = 2'-O-methylcytidine-3'-phosphate
  modified_base 18: mod_base = OTHER; note = 2'-O-methylguanosine-3'-phosphate
  modified_base 19: mod_base = OTHER; note = 2'-O-methylcytidine-3'-phosphorothioate
  modified_base 20: mod_base = OTHER; note = 2'-O-methylguanosine-3'-phosphorothioate
  modified_base 21: mod_base = OTHER; note = 2'-O-methyladenosine
gcaccttcctcaatgacgcga

SEQ ID NO: 3916 - RNA, 21 nt, synthetic construct
  source 1..21: mol_type = other RNA
  modified_base 1: mod_base = OTHER; note = 2'-O-methylcytidine-3'-phosphorothioate
  modified_base 2: mod_base = OTHER; note = 2'-O-methyluridine-3'-phosphorothioate
  modified_base 3: mod_base = OTHER; note = 2'-O-methylguanosine-3'-phosphate
  modified_base 4: mod_base = OTHER; note = 2'-O-methylguanosine-3'-phosphate
  modified_base 5: mod_base = OTHER; note = 2'-O-methyladenosine-3'-phosphate
  modified_base 6: mod_base = OTHER; note = 2'-O-hexadecyl-guanosine-3'-phosphate
  modified_base 7: mod_base = OTHER; note = 2'-deoxy-2'-fluoroadenosine-3'-phosphate
  modified_base 8: mod_base = OTHER; note = 2'-O-methylguanosine-3'-phosphate
  modified_base 9: mod_base = OTHER; note = 2'-deoxy-2'-fluoroguanosine-3'-phosphate
  modified_base 10: mod_base = OTHER; note = 2'-deoxy-2'-fluorouridine-3'-phosphate
  modified_base 11: mod_base = OTHER; note = 2'-deoxy-2'-fluoroguanosine-3'-phosphate
  modified_base 12: mod_base = OTHER; note = 2'-O-methylguanosine-3'-phosphate
  modified_base 13: mod_base = OTHER; note = 2'-O-methyluridine-3'-phosphate
  modified_base 14: mod_base = OTHER; note = 2'-O-methylguanosine-3'-phosphate
  modified_base 15: mod_base = OTHER; note = 2'-O-methylcytidine-3'-phosphate
  modified_base 16: mod_base = OTHER; note = 2'-O-methyladenosine-3'-phosphate
  modified_base 17: mod_base = OTHER; note = 2'-O-methylcytidine-3'-phosphate
  modified_base 18: mod_base = OTHER; note = 2'-O-methylguanosine-3'-phosphate
  modified_base 19: mod_base = OTHER; note = 2'-O-methyladenosine-3'-phosphorothioate
  modified_base 20: mod_base = OTHER; note = 2'-O-methylcytidine-3'-phosphorothioate
  modified_base 21: mod_base = OTHER; note = 2'-O-methyladenosine
ctggagaggtggtgcacgaca

SEQ ID NO: 3917 - RNA, 21 nt, synthetic construct
  source 1..21: mol_type = other RNA
  modified_base 1: mod_base = OTHER; note = 2'-O-methylcytidine-3'-phosphorothioate
  modified_base 2: mod_base = OTHER; note = 2'-O-methylcytidine-3'-phosphorothioate
  modified_base 3: mod_base = OTHER; note = 2'-O-methylguanosine-3'-phosphate
  modified_base 4: mod_base = OTHER; note = 2'-O-methyluridine-3'-phosphate
  modified_base 5: mod_base = OTHER; note = 2'-O-methylguanosine-3'-phosphate
  modified_base 6: mod_base = OTHER; note = 2'-O-hexadecyl-uridine-3'-phosphate
  modified_base 7: mod_base = OTHER; note = 2'-deoxy-2'-fluoroguanosine-3'-phosphate
  modified_base 8: mod_base = OTHER; note = 2'-O-methyluridine-3'-phosphate
  modified_base 9: mod_base = OTHER; note = 2'-deoxy-2'-fluorouridine-3'-phosphate
  modified_base 10: mod_base = OTHER; note = 2'-deoxy-2'-fluorocytidine-3'-phosphate
  modified_base 11: mod_base = OTHER; note = 2'-deoxy-2'-fluoroadenosine-3'-phosphate
  modified_base 12: mod_base = OTHER; note = 2'-O-methyluridine-3'-phosphate
  modified_base 13: mod_base = OTHER; note = 2'-O-methylguanosine-3'-phosphate
  modified_base 14: mod_base = OTHER; note = 2'-O-methyluridine-3'-phosphate
  modified_base 15: mod_base = OTHER; note = 2'-O-methyladenosine-3'-phosphate
  modified_base 16: mod_base = OTHER; note = 2'-O-methylcytidine-3'-phosphate
  modified_base 17: mod_base = OTHER; note = 2'-O-methylguanosine-3'-phosphate
  modified_base 18: mod_base = OTHER; note = 2'-O-methylguanosine-3'-phosphate
  modified_base 19: mod_base = OTHER; note = 2'-O-methylguanosine-3'-phosphorothioate
  modified_base 20: mod_base = OTHER; note = 2'-O-methyluridine-3'-phosphorothioate
  modified_base 21: mod_base = OTHER; note = 2'-O-methyladenosine
ccgtgtgttcatgtacgggta

SEQ ID NO: 3918 - RNA, 21 nt, synthetic construct
  source 1..21: mol_type = other RNA
  modified_base 1: mod_base = OTHER; note = 2'-O-methylcytidine-3'-phosphorothioate
  modified_base 2: mod_base = OTHER; note = 2'-O-methylcytidine-3'-phosphorothioate
  modified_base 3: mod_base = OTHER; note = 2'-O-methyluridine-3'-phosphate
  modified_base 4: mod_base = OTHER; note = 2'-O-methylcytidine-3'-phosphate
  modified_base 5: mod_base = OTHER; note = 2'-O-methyluridine-3'-phosphate
  modified_base 6: mod_base = OTHER; note = 2'-O-hexadecyl-cytidine-3'-phosphate
  modified_base 7: mod_base = OTHER; note = 2'-deoxy-2'-fluorouridine-3'-phosphate
  modified_base 8: mod_base = OTHER; note = 2'-O-methylguanosine-3'-phosphate
  modified_base 9: mod_base = OTHER; note = 2'-deoxy-2'-fluorocytidine-3'-phosphate
  modified_base 10: mod_base = OTHER; note = 2'-deoxy-2'-fluoroadenosine-3'-phosphate
  modified_base 11: mod_base = OTHER; note = 2'-deoxy-2'-fluoroguanosine-3'-phosphate
  modified_base 12: mod_base = OTHER; note = 2'-O-methyladenosine-3'-phosphate
  modified_base 13: mod_base = OTHER; note = 2'-O-methyladenosine-3'-phosphate
  modified_base 14: mod_base = OTHER; note = 2'-O-methyladenosine-3'-phosphate
  modified_base 15: mod_base = OTHER; note = 2'-O-methyladenosine-3'-phosphate
  modified_base 16: mod_base = OTHER; note = 2'-O-methylguanosine-3'-phosphate
  modified_base 17: mod_base = OTHER; note = 2'-O-methylcytidine-3'-phosphate
  modified_base 18: mod_base = OTHER; note = 2'-O-methyladenosine-3'-phosphate
  modified_base 19: mod_base = OTHER; note = 2'-O-methylcytidine-3'-phosphorothioate
  modified_base 20: mod_base = OTHER; note = 2'-O-methyladenosine-3'-phosphorothioate
  modified_base 21: mod_base = OTHER; note = 2'-O-methyladenosine
cctctctgcagaaaagcacaa

SEQ ID NO: 3919 - RNA, 21 nt, synthetic construct
  source 1..21: mol_type = other RNA
  modified_base 1: mod_base = OTHER; note = 2'-O-methylguanosine-3'-phosphorothioate
  modified_base 2: mod_base = OTHER; note = 2'-O-methylguanosine-3'-phosphorothioate
  modified_base 3: mod_base = OTHER; note = 2'-O-methyladenosine-3'-phosphate
  modified_base 4: mod_base = OTHER; note = 2'-O-methylcytidine-3'-phosphate
  modified_base 5: mod_base = OTHER; note = 2'-O-methyluridine-3'-phosphate
  modified_base 6: mod_base = OTHER; note = 2'-O-hexadecyl-guanosine-3'-phosphate
  modified_base 7: mod_base = OTHER; note = 2'-deoxy-2'-fluorocytidine-3'-phosphate
  modified_base 8: mod_base = OTHER; note = 2'-O-methyladenosine-3'-phosphate
  modified_base 9: mod_base = OTHER; note = 2'-deoxy-2'-fluoroguanosine-3'-phosphate
  modified_base 10: mod_base = OTHER; note = 2'-deoxy-2'-fluorocytidine-3'-phosphate
  modified_base 11: mod_base = OTHER; note = 2'-deoxy-2'-fluoroadenosine-3'-phosphate
  modified_base 12: mod_base = OTHER; note = 2'-O-methyladenosine-3'-phosphate
  modified_base 13: mod_base = OTHER; note = 2'-O-methylcytidine-3'-phosphate
  modified_base 14: mod_base = OTHER; note = 2'-O-methyladenosine-3'-phosphate
  modified_base 15: mod_base = OTHER; note = 2'-O-methylguanosine-3'-phosphate
  modified_base 16: mod_base = OTHER; note = 2'-O-methylcytidine-3'-phosphate
  modified_base 17: mod_base = OTHER; note = 2'-O-methyluridine-3'-phosphate
  modified_base 18: mod_base = OTHER; note = 2'-O-methylcytidine-3'-phosphate
  modified_base 19: mod_base = OTHER; note = 2'-O-methylguanosine-3'-phosphorothioate
  modified_base 20: mod_base = OTHER; note = 2'-O-methylguanosine-3'-phosphorothioate
  modified_base 21: mod_base = OTHER; note = 2'-O-methyladenosine
ggactgcagcaacagctcgga

SEQ ID NO: 3920 - RNA, 21 nt, synthetic construct
  source 1..21: mol_type = other RNA
  modified_base 1: mod_base = OTHER; note = 2'-O-methylcytidine-3'-phosphorothioate
  modified_base 2: mod_base = OTHER; note = 2'-O-methyluridine-3'-phosphorothioate
  modified_base 3: mod_base = OTHER; note = 2'-O-methylguanosine-3'-phosphate
  modified_base 4: mod_base = OTHER; note = 2'-O-methyluridine-3'-phosphate
  modified_base 5: mod_base = OTHER; note = 2'-O-methyluridine-3'-phosphate
  modified_base 6: mod_base = OTHER; note = 2'-O-hexadecyl-uridine-3'-phosphate
  modified_base 7: mod_base = OTHER; note = 2'-deoxy-2'-fluorocytidine-3'-phosphate
  modified_base 8: mod_base = OTHER; note = 2'-O-methyladenosine-3'-phosphate
  modified_base 9: mod_base = OTHER; note = 2'-deoxy-2'-fluoroguanosine-3'-phosphate
  modified_base 10: mod_base = OTHER; note = 2'-deoxy-2'-fluorocytidine-3'-phosphate
  modified_base 11: mod_base = OTHER; note = 2'-deoxy-2'-fluoroadenosine-3'-phosphate
  modified_base 12: mod_base = OTHER; note = 2'-O-methylcytidine-3'-phosphate
  modified_base 13: mod_base = OTHER; note = 2'-O-methyladenosine-3'-phosphate
  modified_base 14: mod_base = OTHER; note = 2'-O-methylcytidine-3'-phosphate
  modified_base 15: mod_base = OTHER; note = 2'-O-methyladenosine-3'-phosphate
  modified_base 16: mod_base = OTHER; note = 2'-O-methylcytidine-3'-phosphate
  modified_base 17: mod_base = OTHER; note = 2'-O-methyluridine-3'-phosphate
  modified_base 18: mod_base = OTHER; note = 2'-O-methylguanosine-3'-phosphate
  modified_base 19: mod_base = OTHER; note = 2'-O-methylcytidine-3'-phosphorothioate
  modified_base 20: mod_base = OTHER; note = 2'-O-methylguanosine-3'-phosphorothioate
  modified_base 21: mod_base = OTHER; note = 2'-O-methyladenosine
ctgtttcagcacacactgcga

SEQ ID NO: 3921 - RNA, 21 nt, synthetic construct
  source 1..21: mol_type = other RNA
  modified_base 1: mod_base = OTHER; note = 2'-O-methylcytidine-3'-phosphorothioate
  modified_base 2: mod_base = OTHER; note = 2'-O-methyluridine-3'-phosphorothioate
  modified_base 3: mod_base = OTHER; note = 2'-O-methylguanosine-3'-phosphate
  modified_base 4: mod_base = OTHER; note = 2'-O-methylcytidine-3'-phosphate
  modified_base 5: mod_base = OTHER; note = 2'-O-methyladenosine-3'-phosphate
  modified_base 6: mod_base = OTHER; note = 2'-O-hexadecyl-uridine-3'-phosphate
  modified_base 7: mod_base = OTHER; note = 2'-deoxy-2'-fluorouridine-3'-phosphate
  modified_base 8: mod_base = OTHER; note = 2'-O-methylguanosine-3'-phosphate
  modified_base 9: mod_base = OTHER; note = 2'-deoxy-2'-fluorocytidine-3'-phosphate
  modified_base 10: mod_base = OTHER; note = 2'-deoxy-2'-fluorocytidine-3'-phosphate
  modified_base 11: mod_base = OTHER; note = 2'-deoxy-2'-fluoroguanosine-3'-phosphate
  modified_base 12: mod_base = OTHER; note = 2'-O-methyladenosine-3'-phosphate
  modified_base 13: mod_base = OTHER; note = 2'-O-methylguanosine-3'-phosphate
  modified_base 14: mod_base = OTHER; note = 2'-O-methylguanosine-3'-phosphate
  modified_base 15: mod_base = OTHER; note = 2'-O-methyladenosine-3'-phosphate
  modified_base 16: mod_base = OTHER; note = 2'-O-methylguanosine-3'-phosphate
  modified_base 17: mod_base = OTHER; note = 2'-O-methylguanosine-3'-phosphate
  modified_base 18: mod_base = OTHER; note = 2'-O-methyladenosine-3'-phosphate
  modified_base 19: mod_base = OTHER; note = 2'-O-methylcytidine-3'-phosphorothioate
  modified_base 20: mod_base = OTHER; note = 2'-O-methyluridine-3'-phosphorothioate
  modified_base 21: mod_base = OTHER; note = 2'-O-methyladenosine
ctgcattgccgaggaggacta

SEQ ID NO: 3922 - RNA, 21 nt, synthetic construct
  source 1..21: mol_type = other RNA
  modified_base 1: mod_base = OTHER; note = 2'-O-methylcytidine-3'-phosphorothioate
  modified_base 2: mod_base = OTHER; note = 2'-O-methyladenosine-3'-phosphorothioate
  modified_base 3: mod_base = OTHER; note = 2'-O-methylcytidine-3'-phosphate
  modified_base 4: mod_base = OTHER; note = 2'-O-methylcytidine-3'-phosphate
  modified_base 5: mod_base = OTHER; note = 2'-O-methyluridine-3'-phosphate
  modified_base 6: mod_base = OTHER; note = 2'-O-hexadecyl-adenosine-3'-phosphate
  modified_base 7: mod_base = OTHER; note = 2'-deoxy-2'-fluorocytidine-3'-phosphate
  modified_base 8: mod_base = OTHER; note = 2'-O-methyladenosine-3'-phosphate
  modified_base 9: mod_base = OTHER; note = 2'-deoxy-2'-fluoroadenosine-3'-phosphate
  modified_base 10: mod_base = OTHER; note = 2'-deoxy-2'-fluoroguanosine-3'-phosphate
  modified_base 11: mod_base = OTHER; note = 2'-deoxy-2'-fluorocytidine-3'-phosphate
  modified_base 12: mod_base = OTHER; note = 2'-O-methylcytidine-3'-phosphate
  modified_base 13: mod_base = OTHER; note = 2'-O-methyluridine-3'-phosphate
  modified_base 14: mod_base = OTHER; note = 2'-O-methylguanosine-3'-phosphate
  modified_base 15: mod_base = OTHER; note = 2'-O-methylguanosine-3'-phosphate
  modified_base 16: mod_base = OTHER; note = 2'-O-methyladenosine-3'-phosphate
  modified_base 17: mod_base = OTHER; note = 2'-O-methylguanosine-3'-phosphate
  modified_base 18: mod_base = OTHER; note = 2'-O-methyladenosine-3'-phosphate
  modified_base 19: mod_base = OTHER; note = 2'-O-methylguanosine-3'-phosphorothioate
  modified_base 20: mod_base = OTHER; note = 2'-O-methyladenosine-3'-phosphorothioate
  modified_base 21: mod_base = OTHER; note = 2'-O-methyladenosine
cacctacaagcctggagagaa

SEQ ID NO: 3923 - RNA, 21 nt, synthetic construct
  source 1..21: mol_type = other RNA
  modified_base 1: mod_base = OTHER; note = 2'-O-methylcytidine-3'-phosphorothioate
  modified_base 2: mod_base = OTHER; note = 2'-O-methylguanosine-3'-phosphorothioate
  modified_base 3: mod_base = OTHER; note = 2'-O-methyladenosine-3'-phosphate
  modified_base 4: mod_base = OTHER; note = 2'-O-methylcytidine-3'-phosphate
  modified_base 5: mod_base = OTHER; note = 2'-O-methyluridine-3'-phosphate
  modified_base 6: mod_base = OTHER; note = 2'-O-hexadecyl-guanosine-3'-phosphate
  modified_base 7: mod_base = OTHER; note = 2'-deoxy-2'-fluorocytidine-3'-phosphate
  modified_base 8: mod_base = OTHER; note = 2'-O-methyladenosine-3'-phosphate
  modified_base 9: mod_base = OTHER; note = 2'-deoxy-2'-fluoroadenosine-3'-phosphate
  modified_base 10: mod_base = OTHER; note = 2'-deoxy-2'-fluorocytidine-3'-phosphate
  modified_base 11: mod_base = OTHER; note = 2'-deoxy-2'-fluoroadenosine-3'-phosphate
  modified_base 12: mod_base = OTHER; note = 2'-O-methylcytidine-3'-phosphate
  modified_base 13: mod_base = OTHER; note = 2'-O-methylcytidine-3'-phosphate
  modified_base 14: mod_base = OTHER; note = 2'-O-methyluridine-3'-phosphate
  modified_base 15: mod_base = OTHER; note = 2'-O-methylguanosine-3'-phosphate
  modified_base 16: mod_base = OTHER; note = 2'-O-methylcytidine-3'-phosphate
  modified_base 17: mod_base = OTHER; note = 2'-O-methyladenosine-3'-phosphate
  modified_base 18: mod_base = OTHER; note = 2'-O-methylcytidine-3'-phosphate
  modified_base 19: mod_base = OTHER; note = 2'-O-methylcytidine-3'-phosphorothioate
  modified_base 20: mod_base = OTHER; note = 2'-O-methyluridine-3'-phosphorothioate
  modified_base 21: mod_base = OTHER; note = 2'-O-methyladenosine
cgactgcaacacctgcaccta

SEQ ID NO: 3924 - RNA, 21 nt, synthetic construct
  source 1..21: mol_type = other RNA
  modified_base 1: mod_base = OTHER; note = 2'-O-methylguanosine-3'-phosphorothioate
  modified_base 2: mod_base = OTHER; note = 2'-O-methyladenosine-3'-phosphorothioate
  modified_base 3: mod_base = OTHER; note = 2'-O-methyladenosine-3'-phosphate
  modified_base 4: mod_base = OTHER; note = 2'-O-methylcytidine-3'-phosphate
  modified_base 5: mod_base = OTHER; note = 2'-O-methylcytidine-3'-phosphate
  modified_base 6: mod_base = OTHER; note = 2'-O-hexadecyl-guanosine-3'-phosphate
  modified_base 7: mod_base = OTHER; note = 2'-deoxy-2'-fluoroguanosine-3'-phosphate
  modified_base 8: mod_base = OTHER; note = 2'-O-methyladenosine-3'-phosphate
  modified_base 9: mod_base = OTHER; note = 2'-deoxy-2'-fluoroguanosine-3'-phosphate
  modified_base 10: mod_base = OTHER; note = 2'-deoxy-2'-fluoroguanosine-3'-phosphate
  modified_base 11: mod_base = OTHER; note = 2'-deoxy-2'-fluorouridine-3'-phosphate
  modified_base 12: mod_base = OTHER; note = 2'-O-methylguanosine-3'-phosphate
  modified_base 13: mod_base = OTHER; note = 2'-O-methylguanosine-3'-phosphate
  modified_base 14: mod_base = OTHER; note = 2'-O-methylguanosine-3'-phosphate
  modified_base 15: mod_base = OTHER; note = 2'-O-methyladenosine-3'-phosphate
  modified_base 16: mod_base = OTHER; note = 2'-O-methylguanosine-3'-phosphate
  modified_base 17: mod_base = OTHER; note = 2'-O-methyluridine-3'-phosphate
  modified_base 18: mod_base = OTHER; note = 2'-O-methylguanosine-3'-phosphate
  modified_base 19: mod_base = OTHER; note = 2'-O-methylcytidine-3'-phosphorothioate
  modified_base 20: mod_base = OTHER; note = 2'-O-methyladenosine-3'-phosphorothioate
  modified_base 21: mod_base = OTHER; note = 2'-O-methyladenosine
gaaccggaggtgggagtgcaa

SEQ ID NO: 3925 - RNA, 21 nt, synthetic construct
  source 1..21: mol_type = other RNA
  modified_base 1: mod_base = OTHER; note = 2'-O-methyluridine-3'-phosphorothioate
  modified_base 2: mod_base = OTHER; note = 2'-O-methylguanosine-3'-phosphorothioate
  modified_base 3: mod_base = OTHER; note = 2'-O-methylguanosine-3'-phosphate
  modified_base 4: mod_base = OTHER; note = 2'-O-methylcytidine-3'-phosphate
  modified_base 5: mod_base = OTHER; note = 2'-O-methylcytidine-3'-phosphate
  modified_base 6: mod_base = OTHER; note = 2'-O-hexadecyl-adenosine-3'-phosphate
  modified_base 7: mod_base = OTHER; note = 2'-deoxy-2'-fluorocytidine-3'-phosphate
  modified_base 8: mod_base = OTHER; note = 2'-O-methyluridine-3'-phosphate
  modified_base 9: mod_base = OTHER; note = 2'-deoxy-2'-fluorouridine-3'-phosphate
  modified_base 10: mod_base = OTHER; note = 2'-deoxy-2'-fluorocytidine-3'-phosphate
  modified_base 11: mod_base = OTHER; note = 2'-deoxy-2'-fluoroadenosine-3'-phosphate
  modified_base 12: mod_base = OTHER; note = 2'-O-methyluridine-3'-phosphate
  modified_base 13: mod_base = OTHER; note = 2'-O-methylcytidine-3'-phosphate
  modified_base 14: mod_base = OTHER; note = 2'-O-methyladenosine-3'-phosphate
  modified_base 15: mod_base = OTHER; note = 2'-O-methylcytidine-3'-phosphate
  modified_base 16: mod_base = OTHER; note = 2'-O-methylcytidine-3'-phosphate
  modified_base 17: mod_base = OTHER; note = 2'-O-methyluridine-3'-phosphate
  modified_base 18: mod_base = OTHER; note = 2'-O-methyluridine-3'-phosphate
  modified_base 19: mod_base = OTHER; note = 2'-O-methyluridine-3'-phosphorothioate
  modified_base 20: mod_base = OTHER; note = 2'-O-methylguanosine-3'-phosphorothioate
  modified_base 21: mod_base = OTHER; note = 2'-O-methyladenosine
tggccacttcatcacctttga

SEQ ID NO: 3926 - RNA, 21 nt, synthetic construct
  source 1..21: mol_type = other RNA
  modified_base 1: mod_base = OTHER; note = 2'-O-methylcytidine-3'-phosphorothioate
  modified_base 2: mod_base = OTHER; note = 2'-O-methylguanosine-3'-phosphorothioate
  modified_base 3: mod_base = OTHER; note = 2'-O-methyladenosine-3'-phosphate
  modified_base 4: mod_base = OTHER; note = 2'-O-methyluridine-3'-phosphate
  modified_base 5: mod_base = OTHER; note = 2'-O-methylcytidine-3'-phosphate
  modified_base 6: mod_base = OTHER; note = 2'-O-hexadecyl-guanosine-3'-phosphate
  modified_base 7: mod_base = OTHER; note = 2'-deoxy-2'-fluorocytidine-3'-phosphate
  modified_base 8: mod_base = OTHER; note = 2'-O-methyluridine-3'-phosphate
  modified_base 9: mod_base = OTHER; note = 2'-deoxy-2'-fluoroadenosine-3'-phosphate
  modified_base 10: mod_base = OTHER; note = 2'-deoxy-2'-fluorocytidine-3'-phosphate
  modified_base 11: mod_base = OTHER; note = 2'-deoxy-2'-fluoroadenosine-3'-phosphate
  modified_base 12: mod_base = OTHER; note = 2'-O-methylguanosine-3'-phosphate
  modified_base 13: mod_base = OTHER; note = 2'-O-methylcytidine-3'-phosphate
  modified_base 14: mod_base = OTHER; note = 2'-O-methyluridine-3'-phosphate
  modified_base 15: mod_base = OTHER; note = 2'-O-methyluridine-3'-phosphate
  modified_base 16: mod_base = OTHER; note = 2'-O-methyluridine-3'-phosphate
  modified_base 17: mod_base = OTHER; note = 2'-O-methylguanosine-3'-phosphate
  modified_base 18: mod_base = OTHER; note = 2'-O-methyladenosine-3'-phosphate
  modified_base 19: mod_base = OTHER; note = 2'-O-methyladenosine-3'-phosphorothioate
  modified_base 20: mod_base = OTHER; note = 2'-O-methylguanosine-3'-phosphorothioate
  modified_base 21: mod_base = OTHER; note = 2'-O-methyladenosine
cgatcgctacagctttgaaga

SEQ ID NO: 3927 - RNA, 21 nt, synthetic construct
  source 1..21: mol_type = other RNA
  modified_base 1: mod_base = OTHER; note = 2'-O-methylguanosine-3'-phosphorothioate
  modified_base 2: mod_base = OTHER; note = 2'-O-methylcytidine-3'-phosphorothioate
  modified_base 3: mod_base = OTHER; note = 2'-O-methyluridine-3'-phosphate
  modified_base 4: mod_base = OTHER; note = 2'-O-methylguanosine-3'-phosphate
  modified_base 5: mod_base = OTHER; note = 2'-O-methylcytidine-3'-phosphate
  modified_base 6: mod_base = OTHER; note = 2'-O-hexadecyl-guanosine-3'-phosphate
  modified_base 7: mod_base = OTHER; note = 2'-deoxy-2'-fluoroadenosine-3'-phosphate
  modified_base 8: mod_base = OTHER; note = 2'-O-methylguanosine-3'-phosphate
  modified_base 9: mod_base = OTHER; note = 2'-deoxy-2'-fluorouridine-3'-phosphate
  modified_base 10: mod_base = OTHER; note = 2'-deoxy-2'-fluoroadenosine-3'-phosphate
  modified_base 11: mod_base = OTHER; note = 2'-deoxy-2'-fluorocytidine-3'-phosphate
  modified_base 12: mod_base = OTHER; note = 2'-O-methyladenosine-3'-phosphate
  modified_base 13: mod_base = OTHER; note = 2'-O-methyluridine-3'-phosphate
  modified_base 14: mod_base = OTHER; note = 2'-O-methylcytidine-3'-phosphate
  modified_base 15: mod_base = OTHER; note = 2'-O-methyluridine-3'-phosphate
  modified_base 16: mod_base = OTHER; note = 2'-O-methyluridine-3'-phosphate
  modified_base 17: mod_base = OTHER; note = 2'-O-methylguanosine-3'-phosphate
  modified_base 18: mod_base = OTHER; note = 2'-O-methylguanosine-3'-phosphate
  modified_base 19: mod_base = OTHER; note = 2'-O-methylcytidine-3'-phosphorothioate
  modified_base 20: mod_base = OTHER; note = 2'-O-methylcytidine-3'-phosphorothioate
  modified_base 21: mod_base = OTHER; note = 2'-O-methyladenosine
gctgcgagtacatcttggcca

SEQ ID NO: 3928 - RNA, 21 nt, synthetic construct
  source 1..21: mol_type = other RNA
  modified_base 1: mod_base = OTHER; note = 2'-O-methylcytidine-3'-phosphorothioate
  modified_base 2: mod_base = OTHER; note = 2'-O-methyluridine-3'-phosphorothioate
  modified_base 3: mod_base = OTHER; note = 2'-O-methyluridine-3'-phosphate
  modified_base 4: mod_base = OTHER; note = 2'-O-methylcytidine-3'-phosphate
  modified_base 5: mod_base = OTHER; note = 2'-O-methylcytidine-3'-phosphate
  modified_base 6: mod_base = OTHER; note = 2'-O-hexadecyl-guanosine-3'-phosphate
  modified_base 7: mod_base = OTHER; note = 2'-deoxy-2'-fluorocytidine-3'-phosphate
  modified_base 8: mod_base = OTHER; note = 2'-O-methyladenosine-3'-phosphate
  modified_base 9: mod_base = OTHER; note = 2'-deoxy-2'-fluorouridine-3'-phosphate
  modified_base 10: mod_base = OTHER; note = 2'-deoxy-2'-fluorocytidine-3'-phosphate
  modified_base 11: mod_base = OTHER; note = 2'-deoxy-2'-fluoroguanosine-3'-phosphate
  modified_base 12: mod_base = OTHER; note = 2'-O-methyluridine-3'-phosphate
  modified_base 13: mod_base = OTHER; note = 2'-O-methylcytidine-3'-phosphate
  modified_base 14: mod_base = OTHER; note = 2'-O-methyladenosine-3'-phosphate
  modified_base 15: mod_base = OTHER; note = 2'-O-methylcytidine-3'-phosphate
  modified_base 16: mod_base = OTHER; note = 2'-O-methylcytidine-3'-phosphate
  modified_base 17: mod_base = OTHER; note = 2'-O-methylguanosine-3'-phosphate
  modified_base 18: mod_base = OTHER; note = 2'-O-methyladenosine-3'-phosphate
  modified_base 19: mod_base = OTHER; note = 2'-O-methylguanosine-3'-phosphorothioate
  modified_base 20: mod_base = OTHER; note = 2'-O-methyladenosine-3'-phosphorothioate
  modified_base 21: mod_base = OTHER; note = 2'-O-methyladenosine
cttccgcatcgtcaccgagaa

SEQ ID NO: 3929 - RNA, 21 nt, synthetic construct
  source 1..21: mol_type = other RNA
  modified_base 1: mod_base = OTHER; note = 2'-O-methylguanosine-3'-phosphorothioate
  modified_base 2: mod_base = OTHER; note = 2'-O-methylcytidine-3'-phosphorothioate
  modified_base 3: mod_base = OTHER; note = 2'-O-methylcytidine-3'-phosphate
  modified_base 4: mod_base = OTHER; note = 2'-O-methyladenosine-3'-phosphate
  modified_base 5: mod_base = OTHER; note = 2'-O-methyluridine-3'-phosphate
  modified_base 6: mod_base = OTHER; note = 2'-O-hexadecyl-cytidine-3'-phosphate
  modified_base 7: mod_base = OTHER; note = 2'-deoxy-2'-fluoroadenosine-3'-phosphate
  modified_base 8: mod_base = OTHER; note = 2'-O-methyladenosine-3'-phosphate
  modified_base 9: mod_base = OTHER; note = 2'-deoxy-2'-fluoroguanosine-3'-phosphate
  modified_base 10: mod_base = OTHER; note = 2'-deoxy-2'-fluorocytidine-3'-phosphate
  modified_base 11: mod_base = OTHER; note = 2'-deoxy-2'-fluorouridine-3'-phosphate
  modified_base 12: mod_base = OTHER; note = 2'-O-methylcytidine-3'-phosphate
  modified_base 13: mod_base = OTHER; note = 2'-O-methyluridine-3'-phosphate
  modified_base 14: mod_base = OTHER; note = 2'-O-methyluridine-3'-phosphate
  modified_base 15: mod_base = OTHER; note = 2'-O-methylcytidine-3'-phosphate
  modified_base 16: mod_base = OTHER; note = 2'-O-methylguanosine-3'-phosphate
  modified_base 17: mod_base = OTHER; note = 2'-O-methyluridine-3'-phosphate
  modified_base 18: mod_base = OTHER; note = 2'-O-methylguanosine-3'-phosphate
  modified_base 19: mod_base = OTHER; note = 2'-O-methylguanosine-3'-phosphorothioate
  modified_base 20: mod_base = OTHER; note = 2'-O-methyladenosine-3'-phosphorothioate
  modified_base 21: mod_base = OTHER; note = 2'-O-methyladenosine
gccatcaagctcttcgtggaa

SEQ ID NO: 3930 - RNA, 21 nt, synthetic construct
  source 1..21: mol_type = other RNA
  modified_base 1: mod_base = OTHER; note = 2'-O-methyluridine-3'-phosphorothioate
  modified_base 2: mod_base = OTHER; note = 2'-O-methyladenosine-3'-phosphorothioate
  modified_base 3: mod_base = OTHER; note = 2'-O-methylcytidine-3'-phosphate
  modified_base 4: mod_base = OTHER; note = 2'-O-methylguanosine-3'-phosphate
  modified_base 5: mod_base = OTHER; note = 2'-O-methyladenosine-3'-phosphate
  modified_base 6: mod_base = OTHER; note = 2'-O-hexadecyl-guanosine-3'-phosphate
  modified_base 7: mod_base = OTHER; note = 2'-deoxy-2'-fluorocytidine-3'-phosphate
  modified_base 8: mod_base = OTHER; note = 2'-O-methyluridine-3'-phosphate
  modified_base 9: mod_base = OTHER; note = 2'-deoxy-2'-fluoroguanosine-3'-phosphate
  modified_base 10: mod_base = OTHER; note = 2'-deoxy-2'-fluoroadenosine-3'-phosphate
  modified_base 11: mod_base = OTHER; note = 2'-deoxy-2'-fluorouridine-3'-phosphate
  modified_base 12: mod_base = OTHER; note = 2'-O-methylcytidine-3'-phosphate
  modified_base 13: mod_base = OTHER; note = 2'-O-methylcytidine-3'-phosphate
  modified_base 14: mod_base = OTHER; note = 2'-O-methyluridine-3'-phosphate
  modified_base 15: mod_base = OTHER; note = 2'-O-methylcytidine-3'-phosphate
  modified_base 16: mod_base = OTHER; note = 2'-O-methylcytidine-3'-phosphate
  modified_base 17: mod_base = OTHER; note = 2'-O-methyladenosine-3'-phosphate
  modified_base 18: mod_base = OTHER; note = 2'-O-methyladenosine-3'-phosphate
  modified_base 19: mod_base = OTHER; note = 2'-O-methylguanosine-3'-phosphorothioate
  modified_base 20: mod_base = OTHER; note = 2'-O-methyladenosine-3'-phosphorothioate
  modified_base 21: mod_base = OTHER; note = 2'-O-methyladenosine
tacgagctgatcctccaagaa

SEQ ID NO: 3931 - RNA, 21 nt, synthetic construct
  source 1..21: mol_type = other RNA
  modified_base 1: mod_base = OTHER; note = 2'-O-methylguanosine-3'-phosphorothioate
  modified_base 2: mod_base = OTHER; note = 2'-O-methyladenosine-3'-phosphorothioate
  modified_base 3: mod_base = OTHER; note = 2'-O-methylcytidine-3'-phosphate
  modified_base 4: mod_base = OTHER; note = 2'-O-methylcytidine-3'-phosphate
  modified_base 5: mod_base = OTHER; note = 2'-O-methyluridine-3'-phosphate
  modified_base 6: mod_base = OTHER; note = 2'-O-hexadecyl-uridine-3'-phosphate
  modified_base 7: mod_base = OTHER; note = 2'-deoxy-2'-fluorouridine-3'-phosphate
  modified_base 8: mod_base = OTHER; note = 2'-O-methyladenosine-3'-phosphate
  modified_base 9: mod_base = OTHER; note = 2'-deoxy-2'-fluoroadenosine-3'-phosphate
  modified_base 10: mod_base = OTHER; note = 2'-deoxy-2'-fluoroguanosine-3'-phosphate
  modified_base 11: mod_base = OTHER; note = 2'-deoxy-2'-fluoroguanosine-3'-phosphate
  modified_base 12: mod_base = OTHER; note = 2'-O-methylcytidine-3'-phosphate
  modified_base 13: mod_base = OTHER; note = 2'-O-methylguanosine-3'-phosphate
  modified_base 14: mod_base = OTHER; note = 2'-O-methylguanosine-3'-phosphate
  modified_base 15: mod_base = OTHER; note = 2'-O-methyluridine-3'-phosphate
  modified_base 16: mod_base = OTHER; note = 2'-O-methylguanosine-3'-phosphate
  modified_base 17: mod_base = OTHER; note = 2'-O-methylguanosine-3'-phosphate
  modified_base 18: mod_base = OTHER; note = 2'-O-methylcytidine-3'-phosphate
  modified_base 19: mod_base = OTHER; note = 2'-O-methylguanosine-3'-phosphorothioate
  modified_base 20: mod_base = OTHER; note = 2'-O-methyladenosine-3'-phosphorothioate
  modified_base 21: mod_base = OTHER; note = 2'-O-methyladenosine
gacctttaaggcggtggcgaa

SEQ ID NO: 3932 - RNA, 21 nt, synthetic construct
  source 1..21: mol_type = other RNA
  modified_base 1: mod_base = OTHER; note = 2'-O-methyladenosine-3'-phosphorothioate
  modified_base 2: mod_base = OTHER; note = 2'-O-methylcytidine-3'-phosphorothioate
  modified_base 3: mod_base = OTHER; note = 2'-O-methylcytidine-3'-phosphate
  modified_base 4: mod_base = OTHER; note = 2'-O-methylcytidine-3'-phosphate
  modified_base 5: mod_base = OTHER; note = 2'-O-methyluridine-3'-phosphate
  modified_base 6: mod_base = OTHER; note = 2'-O-hexadecyl-adenosine-3'-phosphate
  modified_base 7: mod_base = OTHER; note = 2'-deoxy-2'-fluorocytidine-3'-phosphate
  modified_base 8: mod_base = OTHER; note = 2'-O-methyladenosine-3'-phosphate
  modified_base 9: mod_base = OTHER; note = 2'-deoxy-2'-fluoroadenosine-3'-phosphate
  modified_base 10: mod_base = OTHER; note = 2'-deoxy-2'-fluoroguanosine-3'-phosphate
  modified_base 11: mod_base = OTHER; note = 2'-deoxy-2'-fluoroadenosine-3'-phosphate
  modified_base 12: mod_base = OTHER; note = 2'-O-methyluridine-3'-phosphate
  modified_base 13: mod_base = OTHER; note = 2'-O-methyladenosine-3'-phosphate
  modified_base 14: mod_base = OTHER; note = 2'-O-methylcytidine-3'-phosphate
  modified_base 15: mod_base = OTHER; note = 2'-O-methylguanosine-3'-phosphate
  modified_base 16: mod_base = OTHER; note = 2'-O-methylcytidine-3'-phosphate
  modified_base 17: mod_base = OTHER; note = 2'-O-methyluridine-3'-phosphate
  modified_base 18: mod_base = OTHER; note = 2'-O-methyladenosine-3'-phosphate
  modified_base 19: mod_base = OTHER; note = 2'-O-methylcytidine-3'-phosphorothioate
  modified_base 20: mod_base = OTHER; note = 2'-O-methyladenosine-3'-phosphorothioate
  modified_base 21: mod_base = OTHER; note = 2'-O-methyladenosine
accctacaagatacgctacaa

SEQ ID NO: 3933 - RNA, 21 nt, synthetic construct
  source 1..21: mol_type = other RNA
  modified_base 1: mod_base = OTHER; note = 2'-O-methyluridine-3'-phosphorothioate
  modified_base 2: mod_base = OTHER; note = 2'-O-methyluridine-3'-phosphorothioate
  modified_base 3: mod_base = OTHER; note = 2'-O-methylcytidine-3'-phosphate
  modified_base 4: mod_base = OTHER; note = 2'-O-methylcytidine-3'-phosphate
  modified_base 5: mod_base = OTHER; note = 2'-O-methyluridine-3'-phosphate
  modified_base 6: mod_base = OTHER; note = 2'-O-hexadecyl-guanosine-3'-phosphate
  modified_base 7: mod_base = OTHER; note = 2'-deoxy-2'-fluoroguanosine-3'-phosphate
  modified_base 8: mod_base = OTHER; note = 2'-O-methyluridine-3'-phosphate
  modified_base 9: mod_base = OTHER; note = 2'-deoxy-2'-fluorocytidine-3'-phosphate
  modified_base 10: mod_base = OTHER; note = 2'-deoxy-2'-fluoroadenosine-3'-phosphate
  modified_base 11: mod_base = OTHER; note = 2'-deoxy-2'-fluorouridine-3'-phosphate
  modified_base 12: mod_base = OTHER; note = 2'-O-methylcytidine-3'-phosphate
  modified_base 13: mod_base = OTHER; note = 2'-O-methylguanosine-3'-phosphate
  modified_base 14: mod_base = OTHER; note = 2'-O-methyladenosine-3'-phosphate
  modified_base 15: mod_base = OTHER; note = 2'-O-methylguanosine-3'-phosphate
  modified_base 16: mod_base = OTHER; note = 2'-O-methyladenosine-3'-phosphate
  modified_base 17: mod_base = OTHER; note = 2'-O-methylcytidine-3'-phosphate
  modified_base 18: mod_base = OTHER; note = 2'-O-methylcytidine-3'-phosphate
  modified_base 19: mod_base = OTHER; note = 2'-O-methylcytidine-3'-phosphorothioate
  modified_base 20: mod_base = OTHER; note = 2'-O-methyladenosine-3'-phosphorothioate
  modified_base 21: mod_base = OTHER; note = 2'-O-methyladenosine
ttcctggtcatcgagacccaa

SEQ ID NO: 3934 - RNA, 21 nt, synthetic construct
  source 1..21: mol_type = other RNA
  modified_base 1: mod_base = OTHER; note = 2'-O-methylcytidine-3'-phosphorothioate
  modified_base 2: mod_base = OTHER; note = 2'-O-methylcytidine-3'-phosphorothioate
  modified_base 3: mod_base = OTHER; note = 2'-O-methyladenosine-3'-phosphate
  modified_base 4: mod_base = OTHER; note = 2'-O-methylguanosine-3'-phosphate
  modified_base 5: mod_base = OTHER; note = 2'-O-methylcytidine-3'-phosphate
  modified_base 6: mod_base = OTHER; note = 2'-O-hexadecyl-guanosine-3'-phosphate
  modified_base 7: mod_base = OTHER; note = 2'-deoxy-2'-fluorouridine-3'-phosphate
  modified_base 8: mod_base = OTHER; note = 2'-O-methylguanosine-3'-phosphate
  modified_base 9: mod_base = OTHER; note = 2'-deoxy-2'-fluorouridine-3'-phosphate
  modified_base 10: mod_base = OTHER; note = 2'-deoxy-2'-fluorouridine-3'-phosphate
  modified_base 11: mod_base = OTHER; note = 2'-deoxy-2'-fluorocytidine-3'-phosphate
  modified_base 12: mod_base = OTHER; note = 2'-O-methyladenosine-3'-phosphate
  modified_base 13: mod_base = OTHER; note = 2'-O-methyluridine-3'-phosphate
  modified_base 14: mod_base = OTHER; note = 2'-O-methylcytidine-3'-phosphate
  modified_base 15: mod_base = OTHER; note = 2'-O-methylcytidine-3'-phosphate
  modified_base 16: mod_base = OTHER; note = 2'-O-methylguanosine-3'-phosphate
  modified_base 17: mod_base = OTHER; note = 2'-O-methyladenosine-3'-phosphate
  modified_base 18: mod_base = OTHER; note = 2'-O-methylcytidine-3'-phosphate
  modified_base 19: mod_base = OTHER; note = 2'-O-methyluridine-3'-phosphorothioate
  modified_base 20: mod_base = OTHER; note = 2'-O-methylguanosine-3'-phosphorothioate
  modified_base 21: mod_base = OTHER; note = 2'-O-methyladenosine
ccagcgtgttcatccgactga

SEQ ID NO: 3935 - RNA, 21 nt, synthetic construct
  source 1..21: mol_type = other RNA
  modified_base 1: mod_base = OTHER; note = 2'-O-methylcytidine-3'-phosphorothioate
  modified_base 2: mod_base = OTHER; note = 2'-O-methyladenosine-3'-phosphorothioate
  modified_base 3: mod_base = OTHER; note = 2'-O-methylguanosine-3'-phosphate
  modified_base 4: mod_base = OTHER; note = 2'-O-methylguanosine-3'-phosphate
  modified_base 5: mod_base = OTHER; note = 2'-O-methyladenosine-3'-phosphate
  modified_base 6: mod_base = OTHER; note = 2'-O-hexadecyl-cytidine-3'-phosphate
  modified_base 7: mod_base = OTHER; note = 2'-deoxy-2'-fluorouridine-3'-phosphate
  modified_base 8: mod_base = OTHER; note = 2'-O-methyladenosine-3'-phosphate
  modified_base 9: mod_base = OTHER; note = 2'-deoxy-2'-fluorocytidine-3'-phosphate
  modified_base 10: mod_base = OTHER; note = 2'-deoxy-2'-fluoroadenosine-3'-phosphate
  modified_base 11: mod_base = OTHER; note = 2'-deoxy-2'-fluoroadenosine-3'-phosphate
  modified_base 12: mod_base = OTHER; note = 2'-O-methylguanosine-3'-phosphate
  modified_base 13: mod_base = OTHER; note = 2'-O-methylguanosine-3'-phosphate
  modified_base 14: mod_base = OTHER; note = 2'-O-methylguanosine-3'-phosphate
  modified_base 15: mod_base = OTHER; note = 2'-O-methylcytidine-3'-phosphate
  modified_base 16: mod_base = OTHER; note = 2'-O-methyladenosine-3'-phosphate
  modified_base 17: mod_base = OTHER; note = 2'-O-methylguanosine-3'-phosphate
  modified_base 18: mod_base = OTHER; note = 2'-O-methylguanosine-3'-phosphate
  modified_base 19: mod_base = OTHER; note = 2'-O-methylguanosine-3'-phosphorothioate
  modified_base 20: mod_base = OTHER; note = 2'-O-methyluridine-3'-phosphorothioate
  modified_base 21: mod_base = OTHER; note = 2'-O-methyladenosine
caggactacaagggcagggta

SEQ ID NO: 3936 - RNA, 21 nt, synthetic construct
  source 1..21: mol_type = other RNA
  modified_base 1: mod_base = OTHER; note = 2'-O-methylguanosine-3'-phosphorothioate
  modified_base 2: mod_base = OTHER; note = 2'-O-methylguanosine-3'-phosphorothioate
  modified_base 3: mod_base = OTHER; note = 2'-O-methylguanosine-3'-phosphate
  modified_base 4: mod_base = OTHER; note = 2'-O-methyladenosine-3'-phosphate
  modified_base 5: mod_base = OTHER; note = 2'-O-methyladenosine-3'-phosphate
  modified_base 6: mod_base = OTHER; note = 2'-O-hexadecyl-cytidine-3'-phosphate
  modified_base 7: mod_base = OTHER; note = 2'-deoxy-2'-fluorouridine-3'-phosphate
  modified_base 8: mod_base = OTHER; note = 2'-O-methyluridine-3'-phosphate
  modified_base 9: mod_base = OTHER; note = 2'-deoxy-2'-fluorocytidine-3'-phosphate
  modified_base 10: mod_base = OTHER; note = 2'-deoxy-2'-fluoroguanosine-3'-phosphate
  modified_base 11: mod_base = OTHER; note = 2'-deoxy-2'-fluoroadenosine-3'-phosphate
  modified_base 12: mod_base = OTHER; note = 2'-O-methylcytidine-3'-phosphate
  modified_base 13: mod_base = OTHER; note = 2'-O-methylguanosine-3'-phosphate
  modified_base 14: mod_base = OTHER; note = 2'-O-methyladenosine-3'-phosphate
  modified_base 15: mod_base = OTHER; note = 2'-O-methylcytidine-3'-phosphate
  modified_base 16: mod_base = OTHER; note = 2'-O-methyladenosine-3'-phosphate
  modified_base 17: mod_base = OTHER; note = 2'-O-methyladenosine-3'-phosphate
  modified_base 18: mod_base = OTHER; note = 2'-O-methyluridine-3'-phosphate
  modified_base 19: mod_base = OTHER; note = 2'-O-methylguanosine-3'-phosphorothioate
  modified_base 20: mod_base = OTHER; note = 2'-O-methylcytidine-3'-phosphorothioate
  modified_base 21: mod_base = OTHER; note = 2'-O-methyladenosine
gggaacttcgacgacaatgca

SEQ ID NO: 3937 - RNA, 21 nt, synthetic construct
  source 1..21: mol_type = other RNA
  modified_base 1: mod_base = OTHER; note = 2'-O-methylcytidine-3'-phosphorothioate
  modified_base 2: mod_base = OTHER; note = 2'-O-methyladenosine-3'-phosphorothioate
  modified_base 3: mod_base = OTHER; note = 2'-O-methyladenosine-3'-phosphate
  modified_base 4: mod_base = OTHER; note = 2'-O-methyluridine-3'-phosphate
  modified_base 5: mod_base = OTHER; note = 2'-O-methylguanosine-3'-phosphate
  modified_base 6: mod_base = OTHER; note = 2'-O-hexadecyl-adenosine-3'-phosphate
  modified_base 7: mod_base = OTHER; note = 2'-deoxy-2'-fluorocytidine-3'-phosphate
  modified_base 8: mod_base = OTHER; note = 2'-O-methyluridine-3'-phosphate
  modified_base 9: mod_base = OTHER; note = 2'-deoxy-2'-fluorouridine-3'-phosphate
  modified_base 10: mod_base = OTHER; note = 2'-deoxy-2'-fluorouridine-3'-phosphate
  modified_base 11: mod_base = OTHER; note = 2'-deoxy-2'-fluoroguanosine-3'-phosphate
  modified_base 12: mod_base = OTHER; note = 2'-O-methylcytidine-3'-phosphate
  modified_base 13: mod_base = OTHER; note = 2'-O-methylcytidine-3'-phosphate
  modified_base 14: mod_base = OTHER; note = 2'-O-methyladenosine-3'-phosphate
  modified_base 15: mod_base = OTHER; note = 2'-O-methylcytidine-3'-phosphate
  modified_base 16: mod_base = OTHER; note = 2'-O-methylguanosine-3'-phosphate
  modified_base 17: mod_base = OTHER; note = 2'-O-methylcytidine-3'-phosphate
  modified_base 18: mod_base = OTHER; note = 2'-O-methylguanosine-3'-phosphate
  modified_base 19: mod_base = OTHER; note = 2'-O-methyluridine-3'-phosphorothioate
  modified_base 20: mod_base = OTHER; note = 2'-O-methyladenosine-3'-phosphorothioate
  modified_base 21: mod_base = OTHER; note = 2'-O-methyladenosine
caatgactttgccacgcgtaa

SEQ ID NO: 3938 - RNA, 21 nt, synthetic construct
  source 1..21: mol_type = other RNA
  modified_base 1: mod_base = OTHER; note = 2'-O-methylguanosine-3'-phosphorothioate
  modified_base 2: mod_base = OTHER; note = 2'-O-methylcytidine-3'-phosphorothioate
  modified_base 3: mod_base = OTHER; note = 2'-O-methyladenosine-3'-phosphate
  modified_base 4: mod_base = OTHER; note = 2'-O-methylcytidine-3'-phosphate
  modified_base 5: mod_base = OTHER; note = 2'-O-methyluridine-3'-phosphate
  modified_base 6: mod_base = OTHER; note = 2'-O-hexadecyl-guanosine-3'-phosphate
  modified_base 7: mod_base = OTHER; note = 2'-deoxy-2'-fluoroguanosine-3'-phosphate
  modified_base 8: mod_base = OTHER; note = 2'-O-methyladenosine-3'-phosphate
  modified_base 9: mod_base = OTHER; note = 2'-deoxy-2'-fluoroguanosine-3'-phosphate
  modified_base 10: mod_base = OTHER; note = 2'-deoxy-2'-fluorouridine-3'-phosphate
  modified_base 11: mod_base = OTHER; note = 2'-deoxy-2'-fluorouridine-3'-phosphate
  modified_base 12: mod_base = OTHER; note = 2'-O-methyluridine-3'-phosphate
  modified_base 13: mod_base = OTHER; note = 2'-O-methylguanosine-3'-phosphate
  modified_base 14: mod_base = OTHER; note = 2'-O-methylguanosine-3'-phosphate
  modified_base 15: mod_base = OTHER; note = 2'-O-methylguanosine-3'-phosphate
  modified_base 16: mod_base = OTHER; note = 2'-O-methyladenosine-3'-phosphate
  modified_base 17: mod_base = OTHER; note = 2'-O-methyladenosine-3'-phosphate
  modified_base 18: mod_base = OTHER; note = 2'-O-methylcytidine-3'-phosphate
  modified_base 19: mod_base = OTHER; note = 2'-O-methyladenosine-3'-phosphorothioate
  modified_base 20: mod_base = OTHER; note = 2'-O-methylguanosine-3'-phosphorothioate
  modified_base 21: mod_base = OTHER; note = 2'-O-methyladenosine
gcactggagtttgggaacaga

SEQ ID NO: 3939 - RNA, 21 nt, synthetic construct
  source 1..21: mol_type = other RNA
  modified_base 1: mod_base = OTHER; note = 2'-O-methylguanosine-3'-phosphorothioate
  modified_base 2: mod_base = OTHER; note = 2'-O-methylguanosine-3'-phosphorothioate
  modified_base 3: mod_base = OTHER; note = 2'-O-methylcytidine-3'-phosphate
  modified_base 4: mod_base = OTHER; note = 2'-O-methylcytidine-3'-phosphate
  modified_base 5: mod_base = OTHER; note = 2'-O-methylcytidine-3'-phosphate
  modified_base 6: mod_base = OTHER; note = 2'-O-hexadecyl-adenosine-3'-phosphate
  modified_base 7: mod_base = OTHER; note = 2'-deoxy-2'-fluoroguanosine-3'-phosphate
  modified_base 8: mod_base = OTHER; note = 2'-O-methyladenosine-3'-phosphate
  modified_base 9: mod_base = OTHER; note = 2'-deoxy-2'-fluoroadenosine-3'-phosphate
  modified_base 10: mod_base = OTHER; note = 2'-deoxy-2'-fluoroguanosine-3'-phosphate
  modified_base 11: mod_base = OTHER; note = 2'-deoxy-2'-fluorocytidine-3'-phosphate
  modified_base 12: mod_base = OTHER; note = 2'-O-methyladenosine-3'-phosphate
  modified_base 13: mod_base = OTHER; note = 2'-O-methylguanosine-3'-phosphate
  modified_base 14: mod_base = OTHER; note = 2'-O-methyluridine-3'-phosphate
  modified_base 15: mod_base = OTHER; note = 2'-O-methylguanosine-3'-phosphate
  modified_base 16: mod_base = OTHER; note = 2'-O-methylcytidine-3'-phosphate
  modified_base 17: mod_base = OTHER; note = 2'-O-methyladenosine-3'-phosphate
  modified_base 18: mod_base = OTHER; note = 2'-O-methylguanosine-3'-phosphate
  modified_base 19: mod_base = OTHER; note = 2'-O-methylcytidine-3'-phosphorothioate
  modified_base 20: mod_base = OTHER; note = 2'-O-methyladenosine-3'-phosphorothioate
  modified_base 21: mod_base = OTHER; note = 2'-O-methyladenosine
ggcccagaagcagtgcagcaa

SEQ ID NO: 3940 - RNA, 21 nt, synthetic construct
  source 1..21: mol_type = other RNA
  modified_base 1: mod_base = OTHER; note = 2'-O-methylcytidine-3'-phosphorothioate
  modified_base 2: mod_base = OTHER; note = 2'-O-methylcytidine-3'-phosphorothioate
  modified_base 3: mod_base = OTHER; note = 2'-O-methyladenosine-3'-phosphate
  modified_base 4: mod_base = OTHER; note = 2'-O-methylguanosine-3'-phosphate
  modified_base 5: mod_base = OTHER; note = 2'-O-methylguanosine-3'-phosphate
  modified_base 6: mod_base = OTHER; note = 2'-O-hexadecyl-uridine-3'-phosphate
  modified_base 7: mod_base = OTHER; note = 2'-deoxy-2'-fluorouridine-3'-phosphate
  modified_base 8: mod_base = OTHER; note = 2'-O-methylguanosine-3'-phosphate
  modified_base 9: mod_base = OTHER; note = 2'-deoxy-2'-fluoroadenosine-3'-phosphate
  modified_base 10: mod_base = OTHER; note = 2'-deoxy-2'-fluorocytidine-3'-phosphate
  modified_base 11: mod_base = OTHER; note = 2'-deoxy-2'-fluorouridine-3'-phosphate
  modified_base 12: mod_base = OTHER; note = 2'-O-methylcytidine-3'-phosphate
  modified_base 13: mod_base = OTHER; note = 2'-O-methylcytidine-3'-phosphate
  modified_base 14: mod_base = OTHER; note = 2'-O-methyladenosine-3'-phosphate
  modified_base 15: mod_base = OTHER; note = 2'-O-methylcytidine-3'-phosphate
  modified_base 16: mod_base = OTHER; note = 2'-O-methylcytidine-3'-phosphate
  modified_base 17: mod_base = OTHER; note = 2'-O-methyladenosine-3'-phosphate
  modified_base 18: mod_base = OTHER; note = 2'-O-methyladenosine-3'-phosphate
  modified_base 19: mod_base = OTHER; note = 2'-O-methylguanosine-3'-phosphorothioate
  modified_base 20: mod_base = OTHER; note = 2'-O-methyluridine-3'-phosphorothioate
  modified_base 21: mod_base = OTHER; note = 2'-O-methyladenosine
ccaggttgactccaccaagta

SEQ ID NO: 3941 - RNA, 21 nt, synthetic construct
  source 1..21: mol_type = other RNA
  modified_base 1: mod_base = OTHER; note = 2'-O-methylcytidine-3'-phosphorothioate
  modified_base 2: mod_base = OTHER; note = 2'-O-methylguanosine-3'-phosphorothioate
  modified_base 3: mod_base = OTHER; note = 2'-O-methyladenosine-3'-phosphate
  modified_base 4: mod_base = OTHER; note = 2'-O-methylguanosine-3'-phosphate
  modified_base 5: mod_base = OTHER; note = 2'-O-methylguanosine-3'-phosphate
  modified_base 6: mod_base = OTHER; note = 2'-O-hexadecyl-cytidine-3'-phosphate
  modified_base 7: mod_base = OTHER; note = 2'-deoxy-2'-fluorocytidine-3'-phosphate
  modified_base 8: mod_base = OTHER; note = 2'-O-methyluridine-3'-phosphate
  modified_base 9: mod_base = OTHER; note = 2'-deoxy-2'-fluoroguanosine-3'-phosphate
  modified_base 10: mod_base = OTHER; note = 2'-deoxy-2'-fluorocytidine-3'-phosphate
  modified_base 11: mod_base = OTHER; note = 2'-deoxy-2'-fluoroguanosine-3'-phosphate
  modified_base 12: mod_base = OTHER; note = 2'-O-methyluridine-3'-phosphate
  modified_base 13: mod_base = OTHER; note = 2'-O-methylguanosine-3'-phosphate
  modified_base 14: mod_base = OTHER; note = 2'-O-methyladenosine-3'-phosphate
  modified_base 15: mod_base = OTHER; note = 2'-O-methyladenosine-3'-phosphate
  modified_base 16: mod_base = OTHER; note = 2'-O-methylcytidine-3'-phosphate
  modified_base 17: mod_base = OTHER; note = 2'-O-methylguanosine-3'-phosphate
  modified_base 18: mod_base = OTHER; note = 2'-O-methyladenosine-3'-phosphate
  modified_base 19: mod_base = OTHER; note = 2'-O-methylcytidine-3'-phosphorothioate
  modified_base 20: mod_base = OTHER; note = 2'-O-methylguanosine-3'-phosphorothioate
  modified_base 21: mod_base = OTHER; note = 2'-O-methyladenosine
cgaggcctgcgtgaacgacga

SEQ ID NO: 3942 - RNA, 21 nt, synthetic construct
  source 1..21: mol_type = other RNA
  modified_base 1: mod_base = OTHER; note = 2'-O-methyladenosine-3'-phosphorothioate
  modified_base 2: mod_base = OTHER; note = 2'-O-methylcytidine-3'-phosphorothioate
  modified_base 3: mod_base = OTHER; note = 2'-O-methyluridine-3'-phosphate
  modified_base 4: mod_base = OTHER; note = 2'-O-methylguanosine-3'-phosphate
  modified_base 5: mod_base = OTHER; note = 2'-O-methylcytidine-3'-phosphate
  modified_base 6: mod_base = OTHER; note = 2'-O-hexadecyl-guanosine-3'-phosphate
  modified_base 7: mod_base = OTHER; note = 2'-deoxy-2'-fluoroadenosine-3'-phosphate
  modified_base 8: mod_base = OTHER; note = 2'-O-methylguanosine-3'-phosphate
  modified_base 9: mod_base = OTHER; note = 2'-deoxy-2'-fluorouridine-3'-phosphate
  modified_base 10: mod_base = OTHER; note = 2'-deoxy-2'-fluoroguanosine-3'-phosphate
  modified_base 11: mod_base = OTHER; note = 2'-deoxy-2'-fluorouridine-3'-phosphate
  modified_base 12: mod_base = OTHER; note = 2'-O-methyluridine-3'-phosphate
  modified_base 13: mod_base = OTHER; note = 2'-O-methyluridine-3'-phosphate
  modified_base 14: mod_base = OTHER; note = 2'-O-methylcytidine-3'-phosphate
  modified_base 15: mod_base = OTHER; note = 2'-O-methyluridine-3'-phosphate
  modified_base 16: mod_base = OTHER; note = 2'-O-methylguanosine-3'-phosphate
  modified_base 17: mod_base = OTHER; note = 2'-O-methylcytidine-3'-phosphate
  modified_base 18: mod_base = OTHER; note = 2'-O-methyladenosine-3'-phosphate
  modified_base 19: mod_base = OTHER; note = 2'-O-methylcytidine-3'-phosphorothioate
  modified_base 20: mod_base = OTHER; note = 2'-O-methylguanosine-3'-phosphorothioate
  modified_base 21: mod_base = OTHER; note = 2'-O-methyladenosine
actgcgagtgtttctgcacga

SEQ ID NO: 3943 - RNA, 21 nt, synthetic construct
  source 1..21: mol_type = other RNA
  modified_base 1: mod_base = OTHER; note = 2'-O-methyluridine-3'-phosphorothioate
  modified_base 2: mod_base = OTHER; note = 2'-O-methylguanosine-3'-phosphorothioate
  modified_base 3: mod_base = OTHER; note = 2'-O-methyluridine-3'-phosphate
  modified_base 4: mod_base = OTHER; note = 2'-O-methylguanosine-3'-phosphate
  modified_base 5: mod_base = OTHER; note = 2'-O-methyluridine-3'-phosphate
  modified_base 6: mod_base = OTHER; note = 2'-O-hexadecyl-guanosine-3'-phosphate
  modified_base 7: mod_base = OTHER; note = 2'-deoxy-2'-fluorouridine-3'-phosphate
  modified_base 8: mod_base = OTHER; note = 2'-O-methylguanosine-3'-phosphate
  modified_base 9: mod_base = OTHER; note = 2'-deoxy-2'-fluorouridine-3'-phosphate
  modified_base 10: mod_base = OTHER; note = 2'-deoxy-2'-fluorocytidine-3'-phosphate
  modified_base 11: mod_base = OTHER; note = 2'-deoxy-2'-fluorocytidine-3'-phosphate
  modified_base 12: mod_base = OTHER; note = 2'-O-methyluridine-3'-phosphate
  modified_base 13: mod_base = OTHER; note = 2'-O-methylguanosine-3'-phosphate
  modified_base 14: mod_base = OTHER; note = 2'-O-methylguanosine-3'-phosphate
  modified_base 15: mod_base = OTHER; note = 2'-O-methylcytidine-3'-phosphate
  modified_base 16: mod_base = OTHER; note = 2'-O-methylguanosine-3'-phosphate
  modified_base 17: mod_base = OTHER; note = 2'-O-methylguanosine-3'-phosphate
  modified_base 18: mod_base = OTHER; note = 2'-O-methyladenosine-3'-phosphate
  modified_base 19: mod_base = OTHER; note = 2'-O-methylcytidine-3'-phosphorothioate
  modified_base 20: mod_base = OTHER; note = 2'-O-methyluridine-3'-phosphorothioate
  modified_base 21: mod_base = OTHER; note = 2'-O-methyladenosine
tgtgtgtgtcctggcggacta

SEQ ID NO: 3944 - RNA, 21 nt, synthetic construct
  source 1..21: mol_type = other RNA
  modified_base 1: mod_base = OTHER; note = 2'-O-methyluridine-3'-phosphorothioate
  modified_base 2: mod_base = OTHER; note = 2'-O-methylguanosine-3'-phosphorothioate
  modified_base 3: mod_base = OTHER; note = 2'-O-methyluridine-3'-phosphate
  modified_base 4: mod_base = OTHER; note = 2'-O-methyluridine-3'-phosphate
  modified_base 5: mod_base = OTHER; note = 2'-O-methylcytidine-3'-phosphate
  modified_base 6: mod_base = OTHER; note = 2'-O-hexadecyl-uridine-3'-phosphate
  modified_base 7: mod_base = OTHER; note = 2'-deoxy-2'-fluoroguanosine-3'-phosphate
  modified_base 8: mod_base = OTHER; note = 2'-O-methyluridine-3'-phosphate
  modified_base 9: mod_base = OTHER; note = 2'-deoxy-2'-fluoroguanosine-3'-phosphate
  modified_base 10: mod_base = OTHER; note = 2'-deoxy-2'-fluoroadenosine-3'-phosphate
  modified_base 11: mod_base = OTHER; note = 2'-deoxy-2'-fluorocytidine-3'-phosphate
  modified_base 12: mod_base = OTHER; note = 2'-O-methyluridine-3'-phosphate
  modified_base 13: mod_base = OTHER; note = 2'-O-methyluridine-3'-phosphate
  modified_base 14: mod_base = OTHER; note = 2'-O-methylcytidine-3'-phosphate
  modified_base 15: mod_base = OTHER; note = 2'-O-methyluridine-3'-phosphate
  modified_base 16: mod_base = OTHER; note = 2'-O-methyladenosine-3'-phosphate
  modified_base 17: mod_base = OTHER; note = 2'-O-methylcytidine-3'-phosphate
  modified_base 18: mod_base = OTHER; note = 2'-O-methyladenosine-3'-phosphate
  modified_base 19: mod_base = OTHER; note = 2'-O-methyladenosine-3'-phosphorothioate
  modified_base 20: mod_base = OTHER; note = 2'-O-methylcytidine-3'-phosphorothioate
  modified_base 21: mod_base = OTHER; note = 2'-O-methyladenosine
tgttctgtgacttctacaaca

SEQ ID NO: 3945 - RNA, 21 nt, synthetic construct
  source 1..21: mol_type = other RNA
  modified_base 1: mod_base = OTHER; note = 2'-O-methyluridine-3'-phosphorothioate
  modified_base 2: mod_base = OTHER; note = 2'-O-methylguanosine-3'-phosphorothioate
  modified_base 3: mod_base = OTHER; note = 2'-O-methyluridine-3'-phosphate
  modified_base 4: mod_base = OTHER; note = 2'-O-methylguanosine-3'-phosphate
  modified_base 5: mod_base = OTHER; note = 2'-O-methyladenosine-3'-phosphate
  modified_base 6: mod_base = OTHER; note = 2'-O-hexadecyl-guanosine-3'-phosphate
  modified_base 7: mod_base = OTHER; note = 2'-deoxy-2'-fluorouridine-3'-phosphate
  modified_base 8: mod_base = OTHER; note = 2'-O-methylguanosine-3'-phosphate
  modified_base 9: mod_base = OTHER; note = 2'-deoxy-2'-fluoroguanosine-3'-phosphate
  modified_base 10: mod_base = OTHER; note = 2'-deoxy-2'-fluorocytidine-3'-phosphate
  modified_base 11: mod_base = OTHER; note = 2'-deoxy-2'-fluoroadenosine-3'-phosphate
  modified_base 12: mod_base = OTHER; note = 2'-O-methylcytidine-3'-phosphate
  modified_base 13: mod_base = OTHER; note = 2'-O-methyluridine-3'-phosphate
  modified_base 14: mod_base = OTHER; note = 2'-O-methyladenosine-3'-phosphate
  modified_base 15: mod_base = OTHER; note = 2'-O-methylcytidine-3'-phosphate
  modified_base 16: mod_base = OTHER; note = 2'-O-methylcytidine-3'-phosphate
  modified_base 17: mod_base = OTHER; note = 2'-O-methyladenosine-3'-phosphate
  modified_base 18: mod_base = OTHER; note = 2'-O-methylguanosine-3'-phosphate
  modified_base 19: mod_base = OTHER; note = 2'-O-methylcytidine-3'-phosphorothioate
  modified_base 20: mod_base = OTHER; note = 2'-O-methylcytidine-3'-phosphorothioate
  modified_base 21: mod_base = OTHER; note = 2'-O-methyladenosine
tgtgagtggcactaccagcca

SEQ ID NO: 3946 - RNA, 21 nt, synthetic construct
  source 1..21: mol_type = other RNA
  modified_base 1: mod_base = OTHER; note = 2'-O-methylguanosine-3'-phosphorothioate
  modified_base 2: mod_base = OTHER; note = 2'-O-methylcytidine-3'-phosphorothioate
  modified_base 3: mod_base = OTHER; note = 2'-O-methyluridine-3'-phosphate
  modified_base 4: mod_base = OTHER; note = 2'-O-methylguanosine-3'-phosphate
  modified_base 5: mod_base = OTHER; note = 2'-O-methylcytidine-3'-phosphate
  modified_base 6: mod_base = OTHER; note = 2'-O-hexadecyl-uridine-3'-phosphate
  modified_base 7: mod_base = OTHER; note = 2'-deoxy-2'-fluoroadenosine-3'-phosphate
  modified_base 8: mod_base = OTHER; note = 2'-O-methylcytidine-3'-phosphate
  modified_base 9: mod_base = OTHER; note = 2'-deoxy-2'-fluorocytidine-3'-phosphate
  modified_base 10: mod_base = OTHER; note = 2'-deoxy-2'-fluorocytidine-3'-phosphate
  modified_base 11: mod_base = OTHER; note = 2'-deoxy-2'-fluoroguanosine-3'-phosphate
  modified_base 12: mod_base = OTHER; note = 2'-O-methyladenosine-3'-phosphate
  modified_base 13: mod_base = OTHER; note = 2'-O-methyladenosine-3'-phosphate
  modified_base 14: mod_base = OTHER; note = 2'-O-methylguanosine-3'-phosphate
  modified_base 15: mod_base = OTHER; note = 2'-O-methyluridine-3'-phosphate
  modified_base 16: mod_base = OTHER; note = 2'-O-methylguanosine-3'-phosphate
  modified_base 17: mod_base = OTHER; note = 2'-O-methylcytidine-3'-phosphate
  modified_base 18: mod_base = OTHER; note = 2'-O-methylcytidine-3'-phosphate
  modified_base 19: mod_base = OTHER; note = 2'-O-methylcytidine-3'-phosphorothioate
  modified_base 20: mod_base = OTHER; note = 2'-O-methyladenosine-3'-phosphorothioate
  modified_base 21: mod_base = OTHER; note = 2'-O-methyladenosine
gctgctacccgaagtgcccaa

SEQ ID NO: 3947 - RNA, 21 nt, synthetic construct
  source 1..21: mol_type = other RNA
  modified_base 1: mod_base = OTHER; note = 2'-O-methyladenosine-3'-phosphorothioate
  modified_base 2: mod_base = OTHER; note = 2'-O-methylguanosine-3'-phosphorothioate
  modified_base 3: mod_base = OTHER; note = 2'-O-methylcytidine-3'-phosphate
  modified_base 4: mod_base = OTHER; note = 2'-O-methylcytidine-3'-phosphate
  modified_base 5: mod_base = OTHER; note = 2'-O-methylcytidine-3'-phosphate
  modified_base 6: mod_base = OTHER; note = 2'-O-hexadecyl-uridine-3'-phosphate
  modified_base 7: mod_base = OTHER; note = 2'-deoxy-2'-fluorouridine-3'-phosphate
  modified_base 8: mod_base = OTHER; note = 2'-O-methylcytidine-3'-phosphate
  modified_base 9: mod_base = OTHER; note = 2'-deoxy-2'-fluorouridine-3'-phosphate
  modified_base 10: mod_base = OTHER; note = 2'-deoxy-2'-fluorouridine-3'-phosphate
  modified_base 11: mod_base = OTHER; note = 2'-deoxy-2'-fluorocytidine-3'-phosphate
  modified_base 12: mod_base = OTHER; note = 2'-O-methyladenosine-3'-phosphate
  modified_base 13: mod_base = OTHER; note = 2'-O-methyladenosine-3'-phosphate
  modified_base 14: mod_base = OTHER; note = 2'-O-methyluridine-3'-phosphate
  modified_base 15: mod_base = OTHER; note = 2'-O-methylguanosine-3'-phosphate
  modified_base 16: mod_base = OTHER; note = 2'-O-methyladenosine-3'-phosphate
  modified_base 17: mod_base = OTHER; note = 2'-O-methylguanosine-3'-phosphate
  modified_base 18: mod_base = OTHER; note = 2'-O-methylguanosine-3'-phosphate
  modified_base 19: mod_base = OTHER; note = 2'-O-methyladenosine-3'-phosphorothioate
  modified_base 20: mod_base = OTHER; note = 2'-O-methylcytidine-3'-phosphorothioate
  modified_base 21: mod_base = OTHER; note = 2'-O-methyladenosine
agcccttcttcaatgaggaca

SEQ ID NO: 3948 - RNA, 21 nt, synthetic construct
  source 1..21: mol_type = other RNA
  modified_base 1: mod_base = OTHER; note = 2'-O-methyladenosine-3'-phosphorothioate
  modified_base 2: mod_base = OTHER; note = 2'-O-methyladenosine-3'-phosphorothioate
  modified_base 3: mod_base = OTHER; note = 2'-O-methylguanosine-3'-phosphate
  modified_base 4: mod_base = OTHER; note = 2'-O-methyluridine-3'-phosphate
  modified_base 5: mod_base = OTHER; note = 2'-O-methylguanosine-3'-phosphate
  modified_base 6: mod_base = OTHER; note = 2'-O-hexadecyl-cytidine-3'-phosphate
  modified_base 7: mod_base = OTHER; note = 2'-deoxy-2'-fluoroguanosine-3'-phosphate
  modified_base 8: mod_base = OTHER; note = 2'-O-methyluridine-3'-phosphate
  modified_base 9: mod_base = OTHER; note = 2'-deoxy-2'-fluoroguanosine-3'-phosphate
  modified_base 10: mod_base = OTHER; note = 2'-deoxy-2'-fluoroguanosine-3'-phosphate
  modified_base 11: mod_base = OTHER; note = 2'-deoxy-2'-fluorocytidine-3'-phosphate
  modified_base 12: mod_base = OTHER; note = 2'-O-methylcytidine-3'-phosphate
  modified_base 13: mod_base = OTHER; note = 2'-O-methylcytidine-3'-phosphate
  modified_base 14: mod_base = OTHER; note = 2'-O-methyladenosine-3'-phosphate
  modified_base 15: mod_base = OTHER; note = 2'-O-methylguanosine-3'-phosphate
  modified_base 16: mod_base = OTHER; note = 2'-O-methyluridine-3'-phosphate
  modified_base 17: mod_base = OTHER; note = 2'-O-methylguanosine-3'-phosphate
  modified_base 18: mod_base = OTHER; note = 2'-O-methyluridine-3'-phosphate
  modified_base 19: mod_base = OTHER; note = 2'-O-methylguanosine-3'-phosphorothioate
  modified_base 20: mod_base = OTHER; note = 2'-O-methylguanosine-3'-phosphorothioate
  modified_base 21: mod_base = OTHER; note = 2'-O-methyladenosine
aagtgcgtggcccagtgtgga

SEQ ID NO: 3949 - RNA, 21 nt, synthetic construct
  source 1..21: mol_type = other RNA
  modified_base 1: mod_base = OTHER; note = 2'-O-methylcytidine-3'-phosphorothioate
  modified_base 2: mod_base = OTHER; note = 2'-O-methyluridine-3'-phosphorothioate
  modified_base 3: mod_base = OTHER; note = 2'-O-methyladenosine-3'-phosphate
  modified_base 4: mod_base = OTHER; note = 2'-O-methylcytidine-3'-phosphate
  modified_base 5: mod_base = OTHER; note = 2'-O-methylguanosine-3'-phosphate
  modified_base 6: mod_base = OTHER; note = 2'-O-hexadecyl-adenosine-3'-phosphate
  modified_base 7: mod_base = OTHER; note = 2'-deoxy-2'-fluorocytidine-3'-phosphate
  modified_base 8: mod_base = OTHER; note = 2'-O-methyladenosine-3'-phosphate
  modified_base 9: mod_base = OTHER; note = 2'-deoxy-2'-fluoroadenosine-3'-phosphate
  modified_base 10: mod_base = OTHER; note = 2'-deoxy-2'-fluoroguanosine-3'-phosphate
  modified_base 11: mod_base = OTHER; note = 2'-deoxy-2'-fluoroguanosine-3'-phosphate
  modified_base 12: mod_base = OTHER; note = 2'-O-methyladenosine-3'-phosphate
  modified_base 13: mod_base = OTHER; note = 2'-O-methylcytidine-3'-phosphate
  modified_base 14: mod_base = OTHER; note = 2'-O-methylguanosine-3'-phosphate
  modified_base 15: mod_base = OTHER; note = 2'-O-methylguanosine-3'-phosphate
  modified_base 16: mod_base = OTHER; note = 2'-O-methyladenosine-3'-phosphate
  modified_base 17: mod_base = OTHER; note = 2'-O-methyladenosine-3'-phosphate
  modified_base 18: mod_base = OTHER; note = 2'-O-methyladenosine-3'-phosphate
  modified_base 19: mod_base = OTHER; note = 2'-O-methylcytidine-3'-phosphorothioate
  modified_base 20: mod_base = OTHER; note = 2'-O-methyluridine-3'-phosphorothioate
  modified_base 21: mod_base = OTHER; note = 2'-O-methyladenosine
ctacgacaaggacggaaacta

SEQ ID NO: 3950 - RNA, 21 nt, synthetic construct
  source 1..21: mol_type = other RNA
  modified_base 1: mod_base = OTHER; note = 2'-O-methyluridine-3'-phosphorothioate
  modified_base 2: mod_base = OTHER; note = 2'-O-methylguanosine-3'-phosphorothioate
  modified_base 3: mod_base = OTHER; note = 2'-O-methyladenosine-3'-phosphate
  modified_base 4: mod_base = OTHER; note = 2'-O-methylcytidine-3'-phosphate
  modified_base 5: mod_base = OTHER; note = 2'-O-methylguanosine-3'-phosphate
  modified_base 6: mod_base = OTHER; note = 2'-O-hexadecyl-uridine-3'-phosphate
  modified_base 7: mod_base = OTHER; note = 2'-deoxy-2'-fluorocytidine-3'-phosphate
  modified_base 8: mod_base = OTHER; note = 2'-O-methylguanosine-3'-phosphate
  modified_base 9: mod_base = OTHER; note = 2'-deoxy-2'-fluoroguanosine-3'-phosphate
  modified_base 10: mod_base = OTHER; note = 2'-deoxy-2'-fluorouridine-3'-phosphate
  modified_base 11: mod_base = OTHER; note = 2'-deoxy-2'-fluoroguanosine-3'-phosphate
  modified_base 12: mod_base = OTHER; note = 2'-O-methylcytidine-3'-phosphate
  modified_base 13: mod_base = OTHER; note = 2'-O-methyladenosine-3'-phosphate
  modified_base 14: mod_base = OTHER; note = 2'-O-methyladenosine-3'-phosphate
  modified_base 15: mod_base = OTHER; note = 2'-O-methylguanosine-3'-phosphate
  modified_base 16: mod_base = OTHER; note = 2'-O-methylguanosine-3'-phosphate
  modified_base 17: mod_base = OTHER; note = 2'-O-methylguanosine-3'-phosphate
  modified_base 18: mod_base = OTHER; note = 2'-O-methyluridine-3'-phosphate
  modified_base 19: mod_base = OTHER; note = 2'-O-methylcytidine-3'-phosphorothioate
  modified_base 20: mod_base = OTHER; note = 2'-O-methylcytidine-3'-phosphorothioate
  modified_base 21: mod_base = OTHER; note = 2'-O-methyladenosine
tgacgtcggtgcaagggtcca

SEQ ID NO: 3951 - RNA, 21 nt, synthetic construct
  source 1..21: mol_type = other RNA
  modified_base 1: mod_base = OTHER; note = 2'-O-methylcytidine-3'-phosphorothioate
  modified_base 2: mod_base = OTHER; note = 2'-O-methylcytidine-3'-phosphorothioate
  modified_base 3: mod_base = OTHER; note = 2'-O-methyladenosine-3'-phosphate
  modified_base 4: mod_base = OTHER; note = 2'-O-methylguanosine-3'-phosphate
  modified_base 5: mod_base = OTHER; note = 2'-O-methyladenosine-3'-phosphate
  modified_base 6: mod_base = OTHER; note = 2'-O-hexadecyl-guanosine-3'-phosphate
  modified_base 7: mod_base = OTHER; note = 2'-deoxy-2'-fluorocytidine-3'-phosphate
  modified_base 8: mod_base = OTHER; note = 2'-O-methyluridine-3'-phosphate
  modified_base 9: mod_base = OTHER; note = 2'-deoxy-2'-fluoroguanosine-3'-phosphate
  modified_base 10: mod_base = OTHER; note = 2'-deoxy-2'-fluorouridine-3'-phosphate
  modified_base 11: mod_base = OTHER; note = 2'-deoxy-2'-fluoroadenosine-3'-phosphate
  modified_base 12: mod_base = OTHER; note = 2'-O-methyladenosine-3'-phosphate
  modified_base 13: mod_base = OTHER; note = 2'-O-methylcytidine-3'-phosphate
  modified_base 14: mod_base = OTHER; note = 2'-O-methyluridine-3'-phosphate
  modified_base 15: mod_base = OTHER; note = 2'-O-methylguanosine-3'-phosphate
  modified_base 16: mod_base = OTHER; note = 2'-O-methylcytidine-3'-phosphate
  modified_base 17: mod_base = OTHER; note = 2'-O-methyladenosine-3'-phosphate
  modified_base 18: mod_base = OTHER; note = 2'-O-methylcytidine-3'-phosphate
  modified_base 19: mod_base = OTHER; note = 2'-O-methyladenosine-3'-phosphorothioate
  modified_base 20: mod_base = OTHER; note = 2'-O-methylcytidine-3'-phosphorothioate
  modified_base 21: mod_base = OTHER; note = 2'-O-methyladenosine
ccagagctgtaactgcacaca

SEQ ID NO: 3952 - RNA, 21 nt, synthetic construct
  source 1..21: mol_type = other RNA
  modified_base 1: mod_base = OTHER; note = 2'-O-methylcytidine-3'-phosphorothioate
  modified_base 2: mod_base = OTHER; note = 2'-O-methyladenosine-3'-phosphorothioate
  modified_base 3: mod_base = OTHER; note = 2'-O-methylguanosine-3'-phosphate
  modified_base 4: mod_base = OTHER; note = 2'-O-methyluridine-3'-phosphate
  modified_base 5: mod_base = OTHER; note = 2'-O-methylguanosine-3'-phosphate
  modified_base 6: mod_base = OTHER; note = 2'-O-hexadecyl-cytidine-3'-phosphate
  modified_base 7: mod_base = OTHER; note = 2'-deoxy-2'-fluoroguanosine-3'-phosphate
  modified_base 8: mod_base = OTHER; note = 2'-O-methylcytidine-3'-phosphate
  modified_base 9: mod_base = OTHER; note = 2'-deoxy-2'-fluorouridine-3'-phosphate
  modified_base 10: mod_base = OTHER; note = 2'-deoxy-2'-fluorocytidine-3'-phosphate
  modified_base 11: mod_base = OTHER; note = 2'-deoxy-2'-fluoroadenosine-3'-phosphate
  modified_base 12: mod_base = OTHER; note = 2'-O-methylcytidine-3'-phosphate
  modified_base 13: mod_base = OTHER; note = 2'-O-methyladenosine-3'-phosphate
  modified_base 14: mod_base = OTHER; note = 2'-O-methylguanosine-3'-phosphate
  modified_base 15: mod_base = OTHER; note = 2'-O-methylcytidine-3'-phosphate
  modified_base 16: mod_base = OTHER; note = 2'-O-methylcytidine-3'-phosphate
  modified_base 17: mod_base = OTHER; note = 2'-O-methyluridine-3'-phosphate
  modified_base 18: mod_base = OTHER; note = 2'-O-methyluridine-3'-phosphate
  modified_base 19: mod_base = OTHER; note = 2'-O-methylguanosine-3'-phosphorothioate
  modified_base 20: mod_base = OTHER; note = 2'-O-methyladenosine-3'-phosphorothioate
  modified_base 21: mod_base = OTHER; note = 2'-O-methyladenosine
cagtgcgctcacagccttgaa

SEQ ID NO: 3953 - RNA, 21 nt, synthetic construct
  source 1..21: mol_type = other RNA
  modified_base 1: mod_base = OTHER; note = 2'-O-methylcytidine-3'-phosphorothioate
  modified_base 2: mod_base = OTHER; note = 2'-O-methyluridine-3'-phosphorothioate
  modified_base 3: mod_base = OTHER; note = 2'-O-methylguanosine-3'-phosphate
  modified_base 4: mod_base = OTHER; note = 2'-O-methylcytidine-3'-phosphate
  modified_base 5: mod_base = OTHER; note = 2'-O-methyladenosine-3'-phosphate
  modified_base 6: mod_base = OTHER; note = 2'-O-hexadecyl-cytidine-3'-phosphate
  modified_base 7: mod_base = OTHER; note = 2'-deoxy-2'-fluorocytidine-3'-phosphate
  modified_base 8: mod_base = OTHER; note = 2'-O-methyluridine-3'-phosphate
  modified_base 9: mod_base = OTHER; note = 2'-deoxy-2'-fluoroadenosine-3'-phosphate
  modified_base 10: mod_base = OTHER; note = 2'-deoxy-2'-fluorouridine-3'-phosphate
  modified_base 11: mod_base = OTHER; note = 2'-deoxy-2'-fluoroguanosine-3'-phosphate
  modified_base 12: mod_base = OTHER; note = 2'-O-methyladenosine-3'-phosphate
  modified_base 13: mod_base = OTHER; note = 2'-O-methylguanosine-3'-phosphate
  modified_base 14: mod_base = OTHER; note = 2'-O-methylguanosine-3'-phosphate
  modified_base 15: mod_base = OTHER; note = 2'-O-methyladenosine-3'-phosphate
  modified_base 16: mod_base = OTHER; note = 2'-O-methylcytidine-3'-phosphate
  modified_base 17: mod_base = OTHER; note = 2'-O-methyladenosine-3'-phosphate
  modified_base 18: mod_base = OTHER; note = 2'-O-methylguanosine-3'-phosphate
  modified_base 19: mod_base = OTHER; note = 2'-O-methylguanosine-3'-phosphorothioate
  modified_base 20: mod_base = OTHER; note = 2'-O-methyladenosine-3'-phosphorothioate
  modified_base 21: mod_base = OTHER; note = 2'-O-methyladenosine
ctgcacctatgaggacaggaa

SEQ ID NO: 3954 - RNA, 21 nt, synthetic construct
  source 1..21: mol_type = other RNA
  modified_base 1: mod_base = OTHER; note = 2'-O-methylcytidine-3'-phosphorothioate
  modified_base 2: mod_base = OTHER; note = 2'-O-methyladenosine-3'-phosphorothioate
  modified_base 3: mod_base = OTHER; note = 2'-O-methylguanosine-3'-phosphate
  modified_base 4: mod_base = OTHER; note = 2'-O-methylguanosine-3'-phosphate
  modified_base 5: mod_base = OTHER; note = 2'-O-methyladenosine-3'-phosphate
  modified_base 6: mod_base = OTHER; note = 2'-O-hexadecyl-cytidine-3'-phosphate
  modified_base 7: mod_base = OTHER; note = 2'-deoxy-2'-fluoroguanosine-3'-phosphate
  modified_base 8: mod_base = OTHER; note = 2'-O-methyluridine-3'-phosphate
  modified_base 9: mod_base = OTHER; note = 2'-deoxy-2'-fluorocytidine-3'-phosphate
  modified_base 10: mod_base = OTHER; note = 2'-deoxy-2'-fluoroadenosine-3'-phosphate
  modified_base 11: mod_base = OTHER; note = 2'-deoxy-2'-fluorouridine-3'-phosphate
  modified_base 12: mod_base = OTHER; note = 2'-O-methylcytidine-3'-phosphate
  modified_base 13: mod_base = OTHER; note = 2'-O-methyluridine-3'-phosphate
  modified_base 14: mod_base = OTHER; note = 2'-O-methyladenosine-3'-phosphate
  modified_base 15: mod_base = OTHER; note = 2'-O-methylcytidine-3'-phosphate
  modified_base 16: mod_base = OTHER; note = 2'-O-methyladenosine-3'-phosphate
  modified_base 17: mod_base = OTHER; note = 2'-O-methyladenosine-3'-phosphate
  modified_base 18: mod_base = OTHER; note = 2'-O-methylcytidine-3'-phosphate
  modified_base 19: mod_base = OTHER; note = 2'-O-methyladenosine-3'-phosphorothioate
  modified_base 20: mod_base = OTHER; note = 2'-O-methylcytidine-3'-phosphorothioate
  modified_base 21: mod_base = OTHER; note = 2'-O-methyladenosine
caggacgtcatctacaacaca

SEQ ID NO: 3955 - RNA, 21 nt, synthetic construct
  source 1..21: mol_type = other RNA
  modified_base 1: mod_base = OTHER; note = 2'-O-methylcytidine-3'-phosphorothioate
  modified_base 2: mod_base = OTHER; note = 2'-O-methylguanosine-3'-phosphorothioate
  modified_base 3: mod_base = OTHER; note = 2'-O-methylcytidine-3'-phosphate
  modified_base 4: mod_base = OTHER; note = 2'-O-methylcytidine-3'-phosphate
  modified_base 5: mod_base = OTHER; note = 2'-O-methyluridine-3'-phosphate
  modified_base 6: mod_base = OTHER; note = 2'-O-hexadecyl-guanosine-3'-phosphate
  modified_base 7: mod_base = OTHER; note = 2'-deoxy-2'-fluorocytidine-3'-phosphate
  modified_base 8: mod_base = OTHER; note = 2'-O-methyluridine-3'-phosphate
  modified_base 9: mod_base = OTHER; note = 2'-deoxy-2'-fluorouridine-3'-phosphate
  modified_base 10: mod_base = OTHER; note = 2'-deoxy-2'-fluoroguanosine-3'-phosphate
  modified_base 11: mod_base = OTHER; note = 2'-deoxy-2'-fluoroadenosine-3'-phosphate
  modified_base 12: mod_base = OTHER; note = 2'-O-methyluridine-3'-phosphate
  modified_base 13: mod_base = OTHER; note = 2'-O-methylcytidine-3'-phosphate
  modified_base 14: mod_base = OTHER; note = 2'-O-methylguanosine-3'-phosphate
  modified_base 15: mod_base = OTHER; note = 2'-O-methylcytidine-3'-phosphate
  modified_base 16: mod_base = OTHER; note = 2'-O-methylcytidine-3'-phosphate
  modified_base 17: mod_base = OTHER; note = 2'-O-methyladenosine-3'-phosphate
  modified_base 18: mod_base = OTHER; note = 2'-O-methyluridine-3'-phosphate
  modified_base 19: mod_base = OTHER; note = 2'-O-methylcytidine-3'-phosphorothioate
  modified_base 20: mod_base = OTHER; note = 2'-O-methyluridine-3'-phosphorothioate
  modified_base 21: mod_base = OTHER; note = 2'-O-methyladenosine
cgcctgcttgatcgccatcta

SEQ ID NO: 3956 - RNA, 21 nt, synthetic construct
  source 1..21: mol_type = other RNA
  modified_base 1: mod_base = OTHER; note = 2'-O-methyladenosine-3'-phosphorothioate
  modified_base 2: mod_base = OTHER; note = 2'-O-methylcytidine-3'-phosphorothioate
  modified_base 3: mod_base = OTHER; note = 2'-O-methylcytidine-3'-phosphate
  modified_base 4: mod_base = OTHER; note = 2'-O-methyladenosine-3'-phosphate
  modified_base 5: mod_base = OTHER; note = 2'-O-methyluridine-3'-phosphate
  modified_base 6: mod_base = OTHER; note = 2'-O-hexadecyl-cytidine-3'-phosphate
  modified_base 7: mod_base = OTHER; note = 2'-deoxy-2'-fluoroadenosine-3'-phosphate
  modified_base 8: mod_base = OTHER; note = 2'-O-methyluridine-3'-phosphate
  modified_base 9: mod_base = OTHER; note = 2'-deoxy-2'-fluorocytidine-3'-phosphate
  modified_base 10: mod_base = OTHER; note = 2'-deoxy-2'-fluoroadenosine-3'-phosphate
  modified_base 11: mod_base = OTHER; note = 2'-deoxy-2'-fluoroguanosine-3'-phosphate
  modified_base 12: mod_base = OTHER; note = 2'-O-methylguanosine-3'-phosphate
  modified_base 13: mod_base = OTHER; note = 2'-O-methyladenosine-3'-phosphate
  modified_base 14: mod_base = OTHER; note = 2'-O-methyladenosine-3'-phosphate
  modified_base 15: mod_base = OTHER; note = 2'-O-methylguanosine-3'-phosphate
  modified_base 16: mod_base = OTHER; note = 2'-O-methylguanosine-3'-phosphate
  modified_base 17: mod_base = OTHER; note = 2'-O-methylcytidine-3'-phosphate
  modified_base 18: mod_base = OTHER; note = 2'-O-methyluridine-3'-phosphate
  modified_base 19: mod_base = OTHER; note = 2'-O-methylguanosine-3'-phosphorothioate
  modified_base 20: mod_base = OTHER; note = 2'-O-methyluridine-3'-phosphorothioate
  modified_base 21: mod_base = OTHER; note = 2'-O-methyladenosine
accatcatcaggaaggctgta

SEQ ID NO: 3957 - RNA, 21 nt, synthetic construct
  source 1..21: mol_type = other RNA
  modified_base 1: mod_base = OTHER; note = 2'-O-methylcytidine-3'-phosphorothioate
  modified_base 2: mod_base = OTHER; note = 2'-O-methyladenosine-3'-phosphorothioate
  modified_base 3: mod_base = OTHER; note = 2'-O-methylcytidine-3'-phosphate
  modified_base 4: mod_base = OTHER; note = 2'-O-methyladenosine-3'-phosphate
  modified_base 5: mod_base = OTHER; note = 2'-O-methyladenosine-3'-phosphate
  modified_base 6: mod_base = OTHER; note = 2'-O-hexadecyl-cytidine-3'-phosphate
  modified_base 7: mod_base = OTHER; note = 2'-deoxy-2'-fluoroguanosine-3'-phosphate
  modified_base 8: mod_base = OTHER; note = 2'-O-methylcytidine-3'-phosphate
  modified_base 9: mod_base = OTHER; note = 2'-deoxy-2'-fluorocytidine-3'-phosphate
  modified_base 10: mod_base = OTHER; note = 2'-deoxy-2'-fluoroadenosine-3'-phosphate
  modified_base 11: mod_base = OTHER; note = 2'-deoxy-2'-fluorouridine-3'-phosphate
  modified_base 12: mod_base = OTHER; note = 2'-O-methyluridine-3'-phosphate
  modified_base 13: mod_base = OTHER; note = 2'-O-methylcytidine-3'-phosphate
  modified_base 14: mod_base = OTHER; note = 2'-O-methyladenosine-3'-phosphate
  modified_base 15: mod_base = OTHER; note = 2'-O-methylcytidine-3'-phosphate
  modified_base 16: mod_base = OTHER; note = 2'-O-methylcytidine-3'-phosphate
  modified_base 17: mod_base = OTHER; note = 2'-O-methyluridine-3'-phosphate
  modified_base 18: mod_base = OTHER; note = 2'-O-methyluridine-3'-phosphate
  modified_base 19: mod_base = OTHER; note = 2'-O-methylcytidine-3'-phosphorothioate
  modified_base 20: mod_base = OTHER; note = 2'-O-methyladenosine-3'-phosphorothioate
  modified_base 21: mod_base = OTHER; note = 2'-O-methyladenosine
cacaacgccattcaccttcaa

SEQ ID NO: 3958 - RNA, 21 nt, synthetic construct
  source 1..21: mol_type = other RNA
  modified_base 1: mod_base = OTHER; note = 2'-O-methyluridine-3'-phosphorothioate
  modified_base 2: mod_base = OTHER; note = 2'-O-methylcytidine-3'-phosphorothioate
  modified_base 3: mod_base = OTHER; note = 2'-O-methylcytidine-3'-phosphate
  modified_base 4: mod_base = OTHER; note = 2'-O-methyladenosine-3'-phosphate
  modified_base 5: mod_base = OTHER; note = 2'-O-methylcytidine-3'-phosphate
  modified_base 6: mod_base = OTHER; note = 2'-O-hexadecyl-cytidine-3'-phosphate
  modified_base 7: mod_base = OTHER; note = 2'-deoxy-2'-fluoroguanosine-3'-phosphate
  modified_base 8: mod_base = OTHER; note = 2'-O-methyluridine-3'-phosphate
  modified_base 9: mod_base = OTHER; note = 2'-deoxy-2'-fluoroguanosine-3'-phosphate
  modified_base 10: mod_base = OTHER; note = 2'-deoxy-2'-fluorouridine-3'-phosphate
  modified_base 11: mod_base = OTHER; note = 2'-deoxy-2'-fluoroguanosine-3'-phosphate
  modified_base 12: mod_base = OTHER; note = 2'-O-methyluridine-3'-phosphate
  modified_base 13: mod_base = OTHER; note = 2'-O-methylguanosine-3'-phosphate
  modified_base 14: mod_base = OTHER; note = 2'-O-methyluridine-3'-phosphate
  modified_base 15: mod_base = OTHER; note = 2'-O-methylcytidine-3'-phosphate
  modified_base 16: mod_base = OTHER; note = 2'-O-methylcytidine-3'-phosphate
  modified_base 17: mod_base = OTHER; note = 2'-O-methylguanosine-3'-phosphate
  modified_base 18: mod_base = OTHER; note = 2'-O-methylcytidine-3'-phosphate
  modified_base 19: mod_base = OTHER; note = 2'-O-methylguanosine-3'-phosphorothioate
  modified_base 20: mod_base = OTHER; note = 2'-O-methyladenosine-3'-phosphorothioate
  modified_base 21: mod_base = OTHER; note = 2'-O-methyladenosine
tccaccgtgtgtgtccgcgaa

SEQ ID NO: 3959 - RNA, 21 nt, synthetic construct
  source 1..21: mol_type = other RNA
  modified_base 1: mod_base = OTHER; note = 2'-O-methyluridine-3'-phosphorothioate
  modified_base 2: mod_base = OTHER; note = 2'-O-methylcytidine-3'-phosphorothioate
  modified_base 3: mod_base = OTHER; note = 2'-O-methylcytidine-3'-phosphate
  modified_base 4: mod_base = OTHER; note = 2'-O-methyladenosine-3'-phosphate
  modified_base 5: mod_base = OTHER; note = 2'-O-methylguanosine-3'-phosphate
  modified_base 6: mod_base = OTHER; note = 2'-O-hexadecyl-cytidine-3'-phosphate
  modified_base 7: mod_base = OTHER; note = 2'-deoxy-2'-fluorouridine-3'-phosphate
  modified_base 8: mod_base = OTHER; note = 2'-O-methylguanosine-3'-phosphate
  modified_base 9: mod_base = OTHER; note = 2'-deoxy-2'-fluoroguanosine-3'-phosphate
  modified_base 10: mod_base = OTHER; note = 2'-deoxy-2'-fluorouridine-3'-phosphate
  modified_base 11: mod_base = OTHER; note = 2'-deoxy-2'-fluoroadenosine-3'-phosphate
  modified_base 12: mod_base = OTHER; note = 2'-O-methylcytidine-3'-phosphate
  modified_base 13: mod_base = OTHER; note = 2'-O-methyladenosine-3'-phosphate
  modified_base 14: mod_base = OTHER; note = 2'-O-methyladenosine-3'-phosphate
  modified_base 15: mod_base = OTHER; note = 2'-O-methyluridine-3'-phosphate
  modified_base 16: mod_base = OTHER; note = 2'-O-methylguanosine-3'-phosphate
  modified_base 17: mod_base = OTHER; note = 2'-O-methylguanosine-3'-phosphate
  modified_base 18: mod_base = OTHER; note = 2'-O-methylguanosine-3'-phosphate
  modified_base 19: mod_base = OTHER; note = 2'-O-methylcytidine-3'-phosphorothioate
  modified_base 20: mod_base = OTHER; note = 2'-O-methyladenosine-3'-phosphorothioate
  modified_base 21: mod_base = OTHER; note = 2'-O-methyladenosine
tccagctggtacaatgggcaa

SEQ ID NO: 3960 - RNA, 21 nt, synthetic construct
  source 1..21: mol_type = other RNA
  modified_base 1: mod_base = OTHER; note = 2'-O-methylcytidine-3'-phosphorothioate
  modified_base 2: mod_base = OTHER; note = 2'-O-methylguanosine-3'-phosphorothioate
  modified_base 3: mod_base = OTHER; note = 2'-O-methylguanosine-3'-phosphate
  modified_base 4: mod_base = OTHER; note = 2'-O-methyladenosine-3'-phosphate
  modified_base 5: mod_base = OTHER; note = 2'-O-methylguanosine-3'-phosphate
  modified_base 6: mod_base = OTHER; note = 2'-O-hexadecyl-adenosine-3'-phosphate
  modified_base 7: mod_base = OTHER; note = 2'-deoxy-2'-fluorocytidine-3'-phosphate
  modified_base 8: mod_base = OTHER; note = 2'-O-methyluridine-3'-phosphate
  modified_base 9: mod_base = OTHER; note = 2'-deoxy-2'-fluorouridine-3'-phosphate
  modified_base 10: mod_base = OTHER; note = 2'-deoxy-2'-fluorouridine-3'-phosphate
  modified_base 11: mod_base = OTHER; note = 2'-deoxy-2'-fluoroguanosine-3'-phosphate
  modified_base 12: mod_base = OTHER; note = 2'-O-methyladenosine-3'-phosphate
  modified_base 13: mod_base = OTHER; note = 2'-O-methylguanosine-3'-phosphate
  modified_base 14: mod_base = OTHER; note = 2'-O-methyladenosine-3'-phosphate
  modified_base 15: mod_base = OTHER; note = 2'-O-methylcytidine-3'-phosphate
  modified_base 16: mod_base = OTHER; note = 2'-O-methylguanosine-3'-phosphate
  modified_base 17: mod_base = OTHER; note = 2'-O-methyluridine-3'-phosphate
  modified_base 18: mod_base = OTHER; note = 2'-O-methyluridine-3'-phosphate
  modified_base 19: mod_base = OTHER; note = 2'-O-methyluridine-3'-phosphorothioate
  modified_base 20: mod_base = OTHER; note = 2'-O-methylguanosine-3'-phosphorothioate
  modified_base 21: mod_base = OTHER; note = 2'-O-methyladenosine
cggagactttgagacgtttga

SEQ ID NO: 3961 - RNA, 21 nt, synthetic construct
  source 1..21: mol_type = other RNA
  modified_base 1: mod_base = OTHER; note = 2'-O-methylguanosine-3'-phosphorothioate
  modified_base 2: mod_base = OTHER; note = 2'-O-methyladenosine-3'-phosphorothioate
  modified_base 3: mod_base = OTHER; note = 2'-O-methylguanosine-3'-phosphate
  modified_base 4: mod_base = OTHER; note = 2'-O-methylguanosine-3'-phosphate
  modified_base 5: mod_base = OTHER; note = 2'-O-methylguanosine-3'-phosphate
  modified_base 6: mod_base = OTHER; note = 2'-O-hexadecyl-uridine-3'-phosphate
  modified_base 7: mod_base = OTHER; note = 2'-deoxy-2'-fluoroadenosine-3'-phosphate
  modified_base 8: mod_base = OTHER; note = 2'-O-methylcytidine-3'-phosphate
  modified_base 9: mod_base = OTHER; note = 2'-deoxy-2'-fluorocytidine-3'-phosphate
  modified_base 10: mod_base = OTHER; note = 2'-deoxy-2'-fluoroadenosine-3'-phosphate
  modified_base 11: mod_base = OTHER; note = 2'-deoxy-2'-fluoroguanosine-3'-phosphate
  modified_base 12: mod_base = OTHER; note = 2'-O-methylguanosine-3'-phosphate
  modified_base 13: mod_base = OTHER; note = 2'-O-methyluridine-3'-phosphate
  modified_base 14: mod_base = OTHER; note = 2'-O-methyladenosine-3'-phosphate
  modified_base 15: mod_base = OTHER; note = 2'-O-methyluridine-3'-phosphate
  modified_base 16: mod_base = OTHER; note = 2'-O-methylguanosine-3'-phosphate
  modified_base 17: mod_base = OTHER; note = 2'-O-methylcytidine-3'-phosphate
  modified_base 18: mod_base = OTHER; note = 2'-O-methylcytidine-3'-phosphate
  modified_base 19: mod_base = OTHER; note = 2'-O-methylcytidine-3'-phosphorothioate
  modified_base 20: mod_base = OTHER; note = 2'-O-methyluridine-3'-phosphorothioate
  modified_base 21: mod_base = OTHER; note = 2'-O-methyladenosine
gagggtaccaggtatgcccta

SEQ ID NO: 3962 - RNA, 21 nt, synthetic construct
  source 1..21: mol_type = other RNA
  modified_base 1: mod_base = OTHER; note = 2'-O-methylcytidine-3'-phosphorothioate
  modified_base 2: mod_base = OTHER; note = 2'-O-methyluridine-3'-phosphorothioate
  modified_base 3: mod_base = OTHER; note = 2'-O-methylguanosine-3'-phosphate
  modified_base 4: mod_base = OTHER; note = 2'-O-methylguanosine-3'-phosphate
  modified_base 5: mod_base = OTHER; note = 2'-O-methylcytidine-3'-phosphate
  modified_base 6: mod_base = OTHER; note = 2'-O-hexadecyl-uridine-3'-phosphate
  modified_base 7: mod_base = OTHER; note = 2'-deoxy-2'-fluoroguanosine-3'-phosphate
  modified_base 8: mod_base = OTHER; note = 2'-O-methyladenosine-3'-phosphate
  modified_base 9: mod_base = OTHER; note = 2'-deoxy-2'-fluorocytidine-3'-phosphate
  modified_base 10: mod_base = OTHER; note = 2'-deoxy-2'-fluoroadenosine-3'-phosphate
  modified_base 11: mod_base = OTHER; note = 2'-deoxy-2'-fluorouridine-3'-phosphate
  modified_base 12: mod_base = OTHER; note = 2'-O-methylcytidine-3'-phosphate
  modified_base 13: mod_base = OTHER; note = 2'-O-methylguanosine-3'-phosphate
  modified_base 14: mod_base = OTHER; note = 2'-O-methyladenosine-3'-phosphate
  modified_base 15: mod_base = OTHER; note = 2'-O-methylguanosine-3'-phosphate
  modified_base 16: mod_base = OTHER; note = 2'-O-methyluridine-3'-phosphate
  modified_base 17: mod_base = OTHER; note = 2'-O-methylguanosine-3'-phosphate
  modified_base 18: mod_base = OTHER; note = 2'-O-methylcytidine-3'-phosphate
  modified_base 19: mod_base = OTHER; note = 2'-O-methylcytidine-3'-phosphorothioate
  modified_base 20: mod_base = OTHER; note = 2'-O-methylguanosine-3'-phosphorothioate
  modified_base 21: mod_base = OTHER; note = 2'-O-methyladenosine
ctggctgacatcgagtgccga

SEQ ID NO: 3963 - RNA, 21 nt, synthetic construct
  source 1..21: mol_type = other RNA
  modified_base 1: mod_base = OTHER; note = 2'-O-methylcytidine-3'-phosphorothioate
  modified_base 2: mod_base = OTHER; note = 2'-O-methyluridine-3'-phosphorothioate
  modified_base 3: mod_base = OTHER; note = 2'-O-methyluridine-3'-phosphate
  modified_base 4: mod_base = OTHER; note = 2'-O-methylcytidine-3'-phosphate
  modified_base 5: mod_base = OTHER; note = 2'-O-methylcytidine-3'-phosphate
  modified_base 6: mod_base = OTHER; note = 2'-O-hexadecyl-cytidine-3'-phosphate
  modified_base 7: mod_base = OTHER; note = 2'-deoxy-2'-fluoroguanosine-3'-phosphate
  modified_base 8: mod_base = OTHER; note = 2'-O-methyladenosine-3'-phosphate
  modified_base 9: mod_base = OTHER; note = 2'-deoxy-2'-fluorocytidine-3'-phosphate
  modified_base 10: mod_base = OTHER; note = 2'-deoxy-2'-fluoroadenosine-3'-phosphate
  modified_base 11: mod_base = OTHER; note = 2'-deoxy-2'-fluorouridine-3'-phosphate
  modified_base 12: mod_base = OTHER; note = 2'-O-methylguanosine-3'-phosphate
  modified_base 13: mod_base = OTHER; note = 2'-O-methylcytidine-3'-phosphate
  modified_base 14: mod_base = OTHER; note = 2'-O-methylcytidine-3'-phosphate
  modified_base 15: mod_base = OTHER; note = 2'-O-methylguanosine-3'-phosphate
  modified_base 16: mod_base = OTHER; note = 2'-O-methylcytidine-3'-phosphate
  modified_base 17: mod_base = OTHER; note = 2'-O-methyluridine-3'-phosphate
  modified_base 18: mod_base = OTHER; note = 2'-O-methylguanosine-3'-phosphate
  modified_base 19: mod_base = OTHER; note = 2'-O-methylguanosine-3'-phosphorothioate
  modified_base 20: mod_base = OTHER; note = 2'-O-methyladenosine-3'-phosphorothioate
  modified_base 21: mod_base = OTHER; note = 2'-O-methyladenosine
cttcccgacatgccgctggaa

SEQ ID NO: 3964 - RNA, 21 nt, synthetic construct
  source 1..21: mol_type = other RNA
  modified_base 1: mod_base = OTHER; note = 2'-O-methylcytidine-3'-phosphorothioate
  modified_base 2: mod_base = OTHER; note = 2'-O-methyladenosine-3'-phosphorothioate
  modified_base 3: mod_base = OTHER; note = 2'-O-methylguanosine-3'-phosphate
  modified_base 4: mod_base = OTHER; note = 2'-O-methylguanosine-3'-phosphate
  modified_base 5: mod_base = OTHER; note = 2'-O-methyluridine-3'-phosphate
  modified_base 6: mod_base = OTHER; note = 2'-O-hexadecyl-guanosine-3'-phosphate
  modified_base 7: mod_base = OTHER; note = 2'-deoxy-2'-fluoroguanosine-3'-phosphate
  modified_base 8: mod_base = OTHER; note = 2'-O-methyladenosine-3'-phosphate
  modified_base 9: mod_base = OTHER; note = 2'-deoxy-2'-fluorocytidine-3'-phosphate
  modified_base 10: mod_base = OTHER; note = 2'-deoxy-2'-fluorouridine-3'-phosphate
  modified_base 11: mod_base = OTHER; note = 2'-deoxy-2'-fluoroguanosine-3'-phosphate
  modified_base 12: mod_base = OTHER; note = 2'-O-methyluridine-3'-phosphate
  modified_base 13: mod_base = OTHER; note = 2'-O-methylguanosine-3'-phosphate
  modified_base 14: mod_base = OTHER; note = 2'-O-methyladenosine-3'-phosphate
  modified_base 15: mod_base = OTHER; note = 2'-O-methylcytidine-3'-phosphate
  modified_base 16: mod_base = OTHER; note = 2'-O-methylcytidine-3'-phosphate
  modified_base 17: mod_base = OTHER; note = 2'-O-methylguanosine-3'-phosphate
  modified_base 18: mod_base = OTHER; note = 2'-O-methylcytidine-3'-phosphate
  modified_base 19: mod_base = OTHER; note = 2'-O-methyladenosine-3'-phosphorothioate
  modified_base 20: mod_base = OTHER; note = 2'-O-methyluridine-3'-phosphorothioate
  modified_base 21: mod_base = OTHER; note = 2'-O-methyladenosine
caggtggactgtgaccgcata

SEQ ID NO: 3965 - RNA, 21 nt, synthetic construct
  source 1..21: mol_type = other RNA
  modified_base 1: mod_base = OTHER; note = 2'-O-methylcytidine-3'-phosphorothioate
  modified_base 2: mod_base = OTHER; note = 2'-O-methylguanosine-3'-phosphorothioate
  modified_base 3: mod_base = OTHER; note = 2'-O-methylcytidine-3'-phosphate
  modified_base 4: mod_base = OTHER; note = 2'-O-methylcytidine-3'-phosphate
  modified_base 5: mod_base = OTHER; note = 2'-O-methyladenosine-3'-phosphate
  modified_base 6: mod_base = OTHER; note = 2'-O-hexadecyl-adenosine-3'-phosphate
  modified_base 7: mod_base = OTHER; note = 2'-deoxy-2'-fluorocytidine-3'-phosphate
  modified_base 8: mod_base = OTHER; note = 2'-O-methyladenosine-3'-phosphate
  modified_base 9: mod_base = OTHER; note = 2'-deoxy-2'-fluoroguanosine-3'-phosphate
  modified_base 10: mod_base = OTHER; note = 2'-deoxy-2'-fluorocytidine-3'-phosphate
  modified_base 11: mod_base = OTHER; note = 2'-deoxy-2'-fluorocytidine-3'-phosphate
  modified_base 12: mod_base = OTHER; note = 2'-O-methyladenosine-3'-phosphate
  modified_base 13: mod_base = OTHER; note = 2'-O-methyladenosine-3'-phosphate
  modified_base 14: mod_base = OTHER; note = 2'-O-methylcytidine-3'-phosphate
  modified_base 15: mod_base = OTHER; note = 2'-O-methyladenosine-3'-phosphate
  modified_base 16: mod_base = OTHER; note = 2'-O-methylguanosine-3'-phosphate
  modified_base 17: mod_base = OTHER; note = 2'-O-methyladenosine-3'-phosphate
  modified_base 18: mod_base = OTHER; note = 2'-O-methylguanosine-3'-phosphate
  modified_base 19: mod_base = OTHER; note = 2'-O-methyluridine-3'-phosphorothioate
  modified_base 20: mod_base = OTHER; note = 2'-O-methylcytidine-3'-phosphorothioate
  modified_base 21: mod_base = OTHER; note = 2'-O-methyladenosine
cgccaacagccaacagagtca

SEQ ID NO: 3966 - RNA, 21 nt, synthetic construct
  source 1..21: mol_type = other RNA
  modified_base 1: mod_base = OTHER; note = 2'-O-methyluridine-3'-phosphorothioate
  modified_base 2: mod_base = OTHER; note = 2'-O-methylcytidine-3'-phosphorothioate
  modified_base 3: mod_base = OTHER; note = 2'-O-methyluridine-3'-phosphate
  modified_base 4: mod_base = OTHER; note = 2'-O-methylguanosine-3'-phosphate
  modified_base 5: mod_base = OTHER; note = 2'-O-methyluridine-3'-phosphate
  modified_base 6: mod_base = OTHER; note = 2'-O-hexadecyl-cytidine-3'-phosphate
  modified_base 7: mod_base = OTHER; note = 2'-deoxy-2'-fluoroadenosine-3'-phosphate
  modified_base 8: mod_base = OTHER; note = 2'-O-methylcytidine-3'-phosphate
  modified_base 9: mod_base = OTHER; note = 2'-deoxy-2'-fluoroguanosine-3'-phosphate
  modified_base 10: mod_base = OTHER; note = 2'-deoxy-2'-fluoroadenosine-3'-phosphate
  modified_base 11: mod_base = OTHER; note = 2'-deoxy-2'-fluorocytidine-3'-phosphate
  modified_base 12: mod_base = OTHER; note = 2'-O-methyluridine-3'-phosphate
  modified_base 13: mod_base = OTHER; note = 2'-O-methyladenosine-3'-phosphate
  modified_base 14: mod_base = OTHER; note = 2'-O-methylcytidine-3'-phosphate
  modified_base 15: mod_base = OTHER; note = 2'-O-methylguanosine-3'-phosphate
  modified_base 16: mod_base = OTHER; note = 2'-O-methyladenosine-3'-phosphate
  modified_base 17: mod_base = OTHER; note = 2'-O-methylguanosine-3'-phosphate
  modified_base 18: mod_base = OTHER; note = 2'-O-methylcytidine-3'-phosphate
  modified_base 19: mod_base = OTHER; note = 2'-O-methyluridine-3'-phosphorothioate
  modified_base 20: mod_base = OTHER; note = 2'-O-methylguanosine-3'-phosphorothioate
  modified_base 21: mod_base = OTHER; note = 2'-O-methyladenosine
tctgtcacgactacgagctga

SEQ ID NO: 3967 - RNA, 21 nt, synthetic construct
  source 1..21: mol_type = other RNA
  modified_base 1: mod_base = OTHER; note = 2'-O-methyluridine-3'-phosphorothioate
  modified_base 2: mod_base = OTHER; note = 2'-O-methylcytidine-3'-phosphorothioate
  modified_base 3: mod_base = OTHER; note = 2'-O-methyluridine-3'-phosphate
  modified_base 4: mod_base = OTHER; note = 2'-O-methylcytidine-3'-phosphate
  modified_base 5: mod_base = OTHER; note = 2'-O-methyluridine-3'-phosphate
  modified_base 6: mod_base = OTHER; note = 2'-O-hexadecyl-guanosine-3'-phosphate
  modified_base 7: mod_base = OTHER; note = 2'-deoxy-2'-fluorocytidine-3'-phosphate
  modified_base 8: mod_base = OTHER; note = 2'-O-methyluridine-3'-phosphate
  modified_base 9: mod_base = OTHER; note = 2'-deoxy-2'-fluoroguanosine-3'-phosphate
  modified_base 10: mod_base = OTHER; note = 2'-deoxy-2'-fluorocytidine-3'-phosphate
  modified_base 11: mod_base = OTHER; note = 2'-deoxy-2'-fluoroguanosine-3'-phosphate
  modified_base 12: mod_base = OTHER; note = 2'-O-methyladenosine-3'-phosphate
  modified_base 13: mod_base = OTHER; note = 2'-O-methyladenosine-3'-phosphate
  modified_base 14: mod_base = OTHER; note = 2'-O-methyluridine-3'-phosphate
  modified_base 15: mod_base = OTHER; note = 2'-O-methyladenosine-3'-phosphate
  modified_base 16: mod_base = OTHER; note = 2'-O-methylcytidine-3'-phosphate
  modified_base 17: mod_base = OTHER; note = 2'-O-methylguanosine-3'-phosphate
  modified_base 18: mod_base = OTHER; note = 2'-O-methyluridine-3'-phosphate
  modified_base 19: mod_base = OTHER; note = 2'-O-methylguanosine-3'-phosphorothioate
  modified_base 20: mod_base = OTHER; note = 2'-O-methylcytidine-3'-phosphorothioate
  modified_base 21: mod_base = OTHER; note = 2'-O-methyladenosine
tctctgctgcgaatacgtgca

SEQ ID NO: 3968 - RNA, 21 nt, synthetic construct
  source 1..21: mol_type = other RNA
  modified_base 1: mod_base = OTHER; note = 2'-O-methylcytidine-3'-phosphorothioate
  modified_base 2: mod_base = OTHER; note = 2'-O-methyladenosine-3'-phosphorothioate
  modified_base 3: mod_base = OTHER; note = 2'-O-methylcytidine-3'-phosphate
  modified_base 4: mod_base = OTHER; note = 2'-O-methylguanosine-3'-phosphate
  modified_base 5: mod_base = OTHER; note = 2'-O-methylguanosine-3'-phosphate
  modified_base 6: mod_base = OTHER; note = 2'-O-hexadecyl-adenosine-3'-phosphate
  modified_base 7: mod_base = OTHER; note = 2'-deoxy-2'-fluoroguanosine-3'-phosphate
  modified_base 8: mod_base = OTHER; note = 2'-O-methylcytidine-3'-phosphate
  modified_base 9: mod_base = OTHER; note = 2'-deoxy-2'-fluorocytidine-3'-phosphate
  modified_base 10: mod_base = OTHER; note = 2'-deoxy-2'-fluorouridine-3'-phosphate
  modified_base 11: mod_base = OTHER; note = 2'-deoxy-2'-fluoroguanosine-3'-phosphate
  modified_base 12: mod_base = OTHER; note = 2'-O-methylcytidine-3'-phosphate
  modified_base 13: mod_base = OTHER; note = 2'-O-methyluridine-3'-phosphate
  modified_base 14: mod_base = OTHER; note = 2'-O-methylguanosine-3'-phosphate
  modified_base 15: mod_base = OTHER; note = 2'-O-methyluridine-3'-phosphate
  modified_base 16: mod_base = OTHER; note = 2'-O-methylguanosine-3'-phosphate
  modified_base 17: mod_base = OTHER; note = 2'-O-methylcytidine-3'-phosphate
  modified_base 18: mod_base = OTHER; note = 2'-O-methylcytidine-3'-phosphate
  modified_base 19: mod_base = OTHER; note = 2'-O-methyluridine-3'-phosphorothioate
  modified_base 20: mod_base = OTHER; note = 2'-O-methyladenosine-3'-phosphorothioate
  modified_base 21: mod_base = OTHER; note = 2'-O-methyladenosine
cacggagcctgctgtgcctaa

SEQ ID NO: 3969 - RNA, 21 nt, synthetic construct
  source 1..21: mol_type = other RNA
  modified_base 1: mod_base = OTHER; note = 2'-O-methyladenosine-3'-phosphorothioate
  modified_base 2: mod_base = OTHER; note = 2'-O-methylguanosine-3'-phosphorothioate
  modified_base 3: mod_base = OTHER; note = 2'-O-methyladenosine-3'-phosphate
  modified_base 4: mod_base = OTHER; note = 2'-O-methylcytidine-3'-phosphate
  modified_base 5: mod_base = OTHER; note = 2'-O-methylcytidine-3'-phosphate
  modified_base 6: mod_base = OTHER; note = 2'-O-hexadecyl-adenosine-3'-phosphate
  modified_base 7: mod_base = OTHER; note = 2'-deoxy-2'-fluorocytidine-3'-phosphate
  modified_base 8: mod_base = OTHER; note = 2'-O-methyladenosine-3'-phosphate
  modified_base 9: mod_base = OTHER; note = 2'-deoxy-2'-fluoroguanosine-3'-phosphate
  modified_base 10: mod_base = OTHER; note = 2'-deoxy-2'-fluorocytidine-3'-phosphate
  modified_base 11: mod_base = OTHER; note = 2'-deoxy-2'-fluoroadenosine-3'-phosphate
  modified_base 12: mod_base = OTHER; note = 2'-O-methyladenosine-3'-phosphate
  modified_base 13: mod_base = OTHER; note = 2'-O-methylcytidine-3'-phosphate
  modified_base 14: mod_base = OTHER; note = 2'-O-methylcytidine-3'-phosphate
  modified_base 15: mod_base = OTHER; note = 2'-O-methylguanosine-3'-phosphate
  modified_base 16: mod_base = OTHER; note = 2'-O-methyladenosine-3'-phosphate
  modified_base 17: mod_base = OTHER; note = 2'-O-methyladenosine-3'-phosphate
  modified_base 18: mod_base = OTHER; note = 2'-O-methyladenosine-3'-phosphate
  modified_base 19: mod_base = OTHER; note = 2'-O-methyladenosine-3'-phosphorothioate
  modified_base 20: mod_base = OTHER; note = 2'-O-methylguanosine-3'-phosphorothioate
  modified_base 21: mod_base = OTHER; note = 2'-O-methyladenosine
agaccacagcaaccgaaaaga

SEQ ID NO: 3970 - RNA, 21 nt, synthetic construct
  source 1..21: mol_type = other RNA
  modified_base 1: mod_base = OTHER; note = 2'-O-methylcytidine-3'-phosphorothioate
  modified_base 2: mod_base = OTHER; note = 2'-O-methyladenosine-3'-phosphorothioate
  modified_base 3: mod_base = OTHER; note = 2'-O-methylcytidine-3'-phosphate
  modified_base 4: mod_base = OTHER; note = 2'-O-methylcytidine-3'-phosphate
  modified_base 5: mod_base = OTHER; note = 2'-O-methyluridine-3'-phosphate
  modified_base 6: mod_base = OTHER; note = 2'-O-hexadecyl-cytidine-3'-phosphate
  modified_base 7: mod_base = OTHER; note = 2'-deoxy-2'-fluoroguanosine-3'-phosphate
  modified_base 8: mod_base = OTHER; note = 2'-O-methylcytidine-3'-phosphate
  modified_base 9: mod_base = OTHER; note = 2'-deoxy-2'-fluoroadenosine-3'-phosphate
  modified_base 10: mod_base = OTHER; note = 2'-deoxy-2'-fluoroguanosine-3'-phosphate
  modified_base 11: mod_base = OTHER; note = 2'-deoxy-2'-fluoroadenosine-3'-phosphate
  modified_base 12: mod_base = OTHER; note = 2'-O-methylcytidine-3'-phosphate
  modified_base 13: mod_base = OTHER; note = 2'-O-methyluridine-3'-phosphate
  modified_base 14: mod_base = OTHER; note = 2'-O-methylguanosine-3'-phosphate
  modified_base 15: mod_base = OTHER; note = 2'-O-methylguanosine-3'-phosphate
  modified_base 16: mod_base = OTHER; note = 2'-O-methylguanosine-3'-phosphate
  modified_base 17: mod_base = OTHER; note = 2'-O-methyluridine-3'-phosphate
  modified_base 18: mod_base = OTHER; note = 2'-O-methylcytidine-3'-phosphate
  modified_base 19: mod_base = OTHER; note = 2'-O-methylcytidine-3'-phosphorothioate
  modified_base 20: mod_base = OTHER; note = 2'-O-methyladenosine-3'-phosphorothioate
  modified_base 21: mod_base = OTHER; note = 2'-O-methyladenosine
cacctcgcagactgggtccaa

SEQ ID NO: 3971 - RNA, 21 nt, synthetic construct
  source 1..21: mol_type = other RNA
  modified_base 1: mod_base = OTHER; note = 2'-O-methyladenosine-3'-phosphorothioate
  modified_base 2: mod_base = OTHER; note = 2'-O-methylcytidine-3'-phosphorothioate
  modified_base 3: mod_base = OTHER; note = 2'-O-methyladenosine-3'-phosphate
  modified_base 4: mod_base = OTHER; note = 2'-O-methylguanosine-3'-phosphate
  modified_base 5: mod_base = OTHER; note = 2'-O-methyladenosine-3'-phosphate
  modified_base 6: mod_base = OTHER; note = 2'-O-hexadecyl-guanosine-3'-phosphate
  modified_base 7: mod_base = OTHER; note = 2'-deoxy-2'-fluorouridine-3'-phosphate
  modified_base 8: mod_base = OTHER; note = 2'-O-methylguanosine-3'-phosphate
  modified_base 9: mod_base = OTHER; note = 2'-deoxy-2'-fluoroguanosine-3'-phosphate
  modified_base 10: mod_base = OTHER; note = 2'-deoxy-2'-fluorouridine-3'-phosphate
  modified_base 11: mod_base = OTHER; note = 2'-deoxy-2'-fluorouridine-3'-phosphate
  modified_base 12: mod_base = OTHER; note = 2'-O-methyluridine-3'-phosphate
  modified_base 13: mod_base = OTHER; note = 2'-O-methylguanosine-3'-phosphate
  modified_base 14: mod_base = OTHER; note = 2'-O-methyladenosine-3'-phosphate
  modified_base 15: mod_base = OTHER; note = 2'-O-methyluridine-3'-phosphate
  modified_base 16: mod_base = OTHER; note = 2'-O-methylguanosine-3'-phosphate
  modified_base 17: mod_base = OTHER; note = 2'-O-methyladenosine-3'-phosphate
  modified_base 18: mod_base = OTHER; note = 2'-O-methylguanosine-3'-phosphate
  modified_base 19: mod_base = OTHER; note = 2'-O-methylguanosine-3'-phosphorothioate
  modified_base 20: mod_base = OTHER; note = 2'-O-methyladenosine-3'-phosphorothioate
  modified_base 21: mod_base = OTHER; note = 2'-O-methyladenosine
acagagtggtttgatgaggaa

SEQ ID NO: 3972 - RNA, 21 nt, synthetic construct
  source 1..21: mol_type = other RNA
  modified_base 1: mod_base = OTHER; note = 2'-O-methylguanosine-3'-phosphorothioate
  modified_base 2: mod_base = OTHER; note = 2'-O-methyladenosine-3'-phosphorothioate
  modified_base 3: mod_base = OTHER; note = 2'-O-methylcytidine-3'-phosphate
  modified_base 4: mod_base = OTHER; note = 2'-O-methylguanosine-3'-phosphate
  modified_base 5: mod_base = OTHER; note = 2'-O-methyluridine-3'-phosphate
  modified_base 6: mod_base = OTHER; note = 2'-O-hexadecyl-uridine-3'-phosphate
  modified_base 7: mod_base = OTHER; note = 2'-deoxy-2'-fluoroguanosine-3'-phosphate
  modified_base 8: mod_base = OTHER; note = 2'-O-methyladenosine-3'-phosphate
  modified_base 9: mod_base = OTHER; note = 2'-deoxy-2'-fluoroguanosine-3'-phosphate
  modified_base 10: mod_base = OTHER; note = 2'-deoxy-2'-fluorouridine-3'-phosphate
  modified_base 11: mod_base = OTHER; note = 2'-deoxy-2'-fluorocytidine-3'-phosphate
  modified_base 12: mod_base = OTHER; note = 2'-O-methylcytidine-3'-phosphate
  modified_base 13: mod_base = OTHER; note = 2'-O-methyluridine-3'-phosphate
  modified_base 14: mod_base = OTHER; note = 2'-O-methyladenosine-3'-phosphate
  modified_base 15: mod_base = OTHER; note = 2'-O-methylcytidine-3'-phosphate
  modified_base 16: mod_base = OTHER; note = 2'-O-methylguanosine-3'-phosphate
  modified_base 17: mod_base = OTHER; note = 2'-O-methyladenosine-3'-phosphate
  modified_base 18: mod_base = OTHER; note = 2'-O-methyluridine-3'-phosphate
  modified_base 19: mod_base = OTHER; note = 2'-O-methyladenosine-3'-phosphorothioate
  modified_base 20: mod_base = OTHER; note = 2'-O-methyladenosine-3'-phosphorothioate
  modified_base 21: mod_base = OTHER; note = 2'-O-methyladenosine
gacgttgagtcctacgataaa

SEQ ID NO: 3973 - RNA, 21 nt, synthetic construct
  source 1..21: mol_type = other RNA
  modified_base 1: mod_base = OTHER; note = 2'-O-methylguanosine-3'-phosphorothioate
  modified_base 2: mod_base = OTHER; note = 2'-O-methylguanosine-3'-phosphorothioate
  modified_base 3: mod_base = OTHER; note = 2'-O-methylcytidine-3'-phosphate
  modified_base 4: mod_base = OTHER; note = 2'-O-methylcytidine-3'-phosphate
  modified_base 5: mod_base = OTHER; note = 2'-O-methylguanosine-3'-phosphate
  modified_base 6: mod_base = OTHER; note = 2'-O-hexadecyl-cytidine-3'-phosphate
  modified_base 7: mod_base = OTHER; note = 2'-deoxy-2'-fluorouridine-3'-phosphate
  modified_base 8: mod_base = OTHER; note = 2'-O-methylguanosine-3'-phosphate
  modified_base 9: mod_base = OTHER; note = 2'-deoxy-2'-fluoroguanosine-3'-phosphate
  modified_base 10: mod_base = OTHER; note = 2'-deoxy-2'-fluoroadenosine-3'-phosphate
  modified_base 11: mod_base = OTHER; note = 2'-deoxy-2'-fluoroguanosine-3'-phosphate
  modified_base 12: mod_base = OTHER; note = 2'-O-methylguanosine-3'-phosphate
  modified_base 13: mod_base = OTHER; note = 2'-O-methylguanosine-3'-phosphate
  modified_base 14: mod_base = OTHER; note = 2'-O-methylcytidine-3'-phosphate
  modified_base 15: mod_base = OTHER; note = 2'-O-methyladenosine-3'-phosphate
  modified_base 16: mod_base = OTHER; note = 2'-O-methylcytidine-3'-phosphate
  modified_base 17: mod_base = OTHER; note = 2'-O-methyluridine-3'-phosphate
  modified_base 18: mod_base = OTHER; note = 2'-O-methyluridine-3'-phosphate
  modified_base 19: mod_base = OTHER; note = 2'-O-methyladenosine-3'-phosphorothioate
  modified_base 20: mod_base = OTHER; note = 2'-O-methyluridine-3'-phosphorothioate
  modified_base 21: mod_base = OTHER; note = 2'-O-methyladenosine
ggccgctggagggcacttata

SEQ ID NO: 3974 - RNA, 21 nt, synthetic construct
  source 1..21: mol_type = other RNA
  modified_base 1: mod_base = OTHER; note = 2'-O-methylcytidine-3'-phosphorothioate
  modified_base 2: mod_base = OTHER; note = 2'-O-methyladenosine-3'-phosphorothioate
  modified_base 3: mod_base = OTHER; note = 2'-O-methylguanosine-3'-phosphate
  modified_base 4: mod_base = OTHER; note = 2'-O-methylcytidine-3'-phosphate
  modified_base 5: mod_base = OTHER; note = 2'-O-methylcytidine-3'-phosphate
  modified_base 6: mod_base = OTHER; note = 2'-O-hexadecyl-uridine-3'-phosphate
  modified_base 7: mod_base = OTHER; note = 2'-deoxy-2'-fluoroadenosine-3'-phosphate
  modified_base 8: mod_base = OTHER; note = 2'-O-methyladenosine-3'-phosphate
  modified_base 9: mod_base = OTHER; note = 2'-deoxy-2'-fluoroguanosine-3'-phosphate
  modified_base 10: mod_base = OTHER; note = 2'-deoxy-2'-fluoroguanosine-3'-phosphate
  modified_base 11: mod_base = OTHER; note = 2'-deoxy-2'-fluoroadenosine-3'-phosphate
  modified_base 12: mod_base = OTHER; note = 2'-O-methylcytidine-3'-phosphate
  modified_base 13: mod_base = OTHER; note = 2'-O-methyladenosine-3'-phosphate
  modified_base 14: mod_base = OTHER; note = 2'-O-methyluridine-3'-phosphate
  modified_base 15: mod_base = OTHER; note = 2'-O-methyladenosine-3'-phosphate
  modified_base 16: mod_base = OTHER; note = 2'-O-methylguanosine-3'-phosphate
  modified_base 17: mod_base = OTHER; note = 2'-O-methyladenosine-3'-phosphate
  modified_base 18: mod_base = OTHER; note = 2'-O-methylguanosine-3'-phosphate
  modified_base 19: mod_base = OTHER; note = 2'-O-methyluridine-3'-phosphorothioate
  modified_base 20: mod_base = OTHER; note = 2'-O-methylguanosine-3'-phosphorothioate
  modified_base 21: mod_base = OTHER; note = 2'-O-methyladenosine
cagcctaaggacatagagtga

SEQ ID NO: 3975 - RNA, 21 nt, synthetic construct
  source 1..21: mol_type = other RNA
  modified_base 1: mod_base = OTHER; note = 2'-O-methyladenosine-3'-phosphorothioate
  modified_base 2: mod_base = OTHER; note = 2'-O-methyladenosine-3'-phosphorothioate
  modified_base 3: mod_base = OTHER; note = 2'-O-methylcytidine-3'-phosphate
  modified_base 4: mod_base = OTHER; note = 2'-O-methyluridine-3'-phosphate
  modified_base 5: mod_base = OTHER; note = 2'-O-methylguanosine-3'-phosphate
  modified_base 6: mod_base = OTHER; note = 2'-O-hexadecyl-guanosine-3'-phosphate
  modified_base 7: mod_base = OTHER; note = 2'-deoxy-2'-fluoroadenosine-3'-phosphate
  modified_base 8: mod_base = OTHER; note = 2'-O-methylcytidine-3'-phosphate
  modified_base 9: mod_base = OTHER; note = 2'-deoxy-2'-fluorocytidine-3'-phosphate
  modified_base 10: mod_base = OTHER; note = 2'-deoxy-2'-fluorocytidine-3'-phosphate
  modified_base 11: mod_base = OTHER; note = 2'-deoxy-2'-fluorouridine-3'-phosphate
  modified_base 12: mod_base = OTHER; note = 2'-O-methylguanosine-3'-phosphate
  modified_base 13: mod_base = OTHER; note = 2'-O-methylguanosine-3'-phosphate
  modified_base 14: mod_base = OTHER; note = 2'-O-methylcytidine-3'-phosphate
  modified_base 15: mod_base = OTHER; note = 2'-O-methyladenosine-3'-phosphate
  modified_base 16: mod_base = OTHER; note = 2'-O-methylcytidine-3'-phosphate
  modified_base 17: mod_base = OTHER; note = 2'-O-methyladenosine-3'-phosphate
  modified_base 18: mod_base = OTHER; note = 2'-O-methylguanosine-3'-phosphate
  modified_base 19: mod_base = OTHER; note = 2'-O-methylguanosine-3'-phosphorothioate
  modified_base 20: mod_base = OTHER; note = 2'-O-methyluridine-3'-phosphorothioate
  modified_base 21: mod_base = OTHER; note = 2'-O-methyladenosine
aactggaccctggcacaggta

SEQ ID NO: 3976 - RNA, 21 nt, synthetic construct
  source 1..21: mol_type = other RNA
  modified_base 1: mod_base = OTHER; note = 2'-O-methylguanosine-3'-phosphorothioate
  modified_base 2: mod_base = OTHER; note = 2'-O-methyluridine-3'-phosphorothioate
  modified_base 3: mod_base = OTHER; note = 2'-O-methylguanosine-3'-phosphate
  modified_base 4: mod_base = OTHER; note = 2'-O-methylcytidine-3'-phosphate
  modified_base 5: mod_base = OTHER; note = 2'-O-methyladenosine-3'-phosphate
  modified_base 6: mod_base = OTHER; note = 2'-O-hexadecyl-cytidine-3'-phosphate
  modified_base 7: mod_base = OTHER; note = 2'-deoxy-2'-fluorouridine-3'-phosphate
  modified_base 8: mod_base = OTHER; note = 2'-O-methylguanosine-3'-phosphate
  modified_base 9: mod_base = OTHER; note = 2'-deoxy-2'-fluorouridine-3'-phosphate
  modified_base 10: mod_base = OTHER; note = 2'-deoxy-2'-fluoroguanosine-3'-phosphate
  modified_base 11: mod_base = OTHER; note = 2'-deoxy-2'-fluoroadenosine-3'-phosphate
  modified_base 12: mod_base = OTHER; note = 2'-O-methylcytidine-3'-phosphate
  modified_base 13: mod_base = OTHER; note = 2'-O-methylguanosine-3'-phosphate
  modified_base 14: mod_base = OTHER; note = 2'-O-methyluridine-3'-phosphate
  modified_base 15: mod_base = OTHER; note = 2'-O-methylcytidine-3'-phosphate
  modified_base 16: mod_base = OTHER; note = 2'-O-methylcytidine-3'-phosphate
  modified_base 17: mod_base = OTHER; note = 2'-O-methyladenosine-3'-phosphate
  modified_base 18: mod_base = OTHER; note = 2'-O-methylcytidine-3'-phosphate
  modified_base 19: mod_base = OTHER; note = 2'-O-methyluridine-3'-phosphorothioate
  modified_base 20: mod_base = OTHER; note = 2'-O-methyluridine-3'-phosphorothioate
  modified_base 21: mod_base = OTHER; note = 2'-O-methyladenosine
gtgcactgtgacgtccactta

SEQ ID NO: 3977 - RNA, 21 nt, synthetic construct
  source 1..21: mol_type = other RNA
  modified_base 1: mod_base = OTHER; note = 2'-O-methylguanosine-3'-phosphorothioate
  modified_base 2: mod_base = OTHER; note = 2'-O-methyluridine-3'-phosphorothioate
  modified_base 3: mod_base = OTHER; note = 2'-O-methylguanosine-3'-phosphate
  modified_base 4: mod_base = OTHER; note = 2'-O-methylcytidine-3'-phosphate
  modified_base 5: mod_base = OTHER; note = 2'-O-methyladenosine-3'-phosphate
  modified_base 6: mod_base = OTHER; note = 2'-O-hexadecyl-guanosine-3'-phosphate
  modified_base 7: mod_base = OTHER; note = 2'-deoxy-2'-fluoroguanosine-3'-phosphate
  modified_base 8: mod_base = OTHER; note = 2'-O-methyladenosine-3'-phosphate
  modified_base 9: mod_base = OTHER; note = 2'-deoxy-2'-fluoroadenosine-3'-phosphate
  modified_base 10: mod_base = OTHER; note = 2'-deoxy-2'-fluorocytidine-3'-phosphate
  modified_base 11: mod_base = OTHER; note = 2'-deoxy-2'-fluorouridine-3'-phosphate
  modified_base 12: mod_base = OTHER; note = 2'-O-methylguanosine-3'-phosphate
  modified_base 13: mod_base = OTHER; note = 2'-O-methylguanosine-3'-phosphate
  modified_base 14: mod_base = OTHER; note = 2'-O-methylguanosine-3'-phosphate
  modified_base 15: mod_base = OTHER; note = 2'-O-methyladenosine-3'-phosphate
  modified_base 16: mod_base = OTHER; note = 2'-O-methylguanosine-3'-phosphate
  modified_base 17: mod_base = OTHER; note = 2'-O-methylcytidine-3'-phosphate
  modified_base 18: mod_base = OTHER; note = 2'-O-methyladenosine-3'-phosphate
  modified_base 19: mod_base = OTHER; note = 2'-O-methylguanosine-3'-phosphorothioate
  modified_base 20: mod_base = OTHER; note = 2'-O-methylguanosine-3'-phosphorothioate
  modified_base 21: mod_base = OTHER; note = 2'-O-methyladenosine
gtgcaggaactgggagcagga

SEQ ID NO: 3978 - RNA, 21 nt, synthetic construct
  source 1..21: mol_type = other RNA
  modified_base 1: mod_base = OTHER; note = 2'-O-methylcytidine-3'-phosphorothioate
  modified_base 2: mod_base = OTHER; note = 2'-O-methylguanosine-3'-phosphorothioate
  modified_base 3: mod_base = OTHER; note = 2'-O-methyluridine-3'-phosphate
  modified_base 4: mod_base = OTHER; note = 2'-O-methylcytidine-3'-phosphate
  modified_base 5: mod_base = OTHER; note = 2'-O-methyluridine-3'-phosphate
  modified_base 6: mod_base = OTHER; note = 2'-O-hexadecyl-uridine-3'-phosphate
  modified_base 7: mod_base = OTHER; note = 2'-deoxy-2'-fluorocytidine-3'-phosphate
  modified_base 8: mod_base = OTHER; note = 2'-O-methyladenosine-3'-phosphate
  modified_base 9: mod_base = OTHER; note = 2'-deoxy-2'-fluoroadenosine-3'-phosphate
  modified_base 10: mod_base = OTHER; note = 2'-deoxy-2'-fluoroguanosine-3'-phosphate
  modified_base 11: mod_base = OTHER; note = 2'-deoxy-2'-fluoroadenosine-3'-phosphate
  modified_base 12: mod_base = OTHER; note = 2'-O-methyluridine-3'-phosphate
  modified_base 13: mod_base = OTHER; note = 2'-O-methylguanosine-3'-phosphate
  modified_base 14: mod_base = OTHER; note = 2'-O-methyluridine-3'-phosphate
  modified_base 15: mod_base = OTHER; note = 2'-O-methylguanosine-3'-phosphate
  modified_base 16: mod_base = OTHER; note = 2'-O-methylcytidine-3'-phosphate
  modified_base 17: mod_base = OTHER; note = 2'-O-methyluridine-3'-phosphate
  modified_base 18: mod_base = OTHER; note = 2'-O-methyladenosine-3'-phosphate
  modified_base 19: mod_base = OTHER; note = 2'-O-methylcytidine-3'-phosphorothioate
  modified_base 20: mod_base = OTHER; note = 2'-O-methyladenosine-3'-phosphorothioate
  modified_base 21: mod_base = OTHER; note = 2'-O-methyladenosine
cgtcttcaagatgtgctacaa

SEQ ID NO: 3979 - RNA, 21 nt, synthetic construct
  source 1..21: mol_type = other RNA
  modified_base 1: mod_base = OTHER; note = 2'-O-methylcytidine-3'-phosphorothioate
  modified_base 2: mod_base = OTHER; note = 2'-O-methyluridine-3'-phosphorothioate
  modified_base 3: mod_base = OTHER; note = 2'-O-methylguanosine-3'-phosphate
  modified_base 4: mod_base = OTHER; note = 2'-O-methylcytidine-3'-phosphate
  modified_base 5: mod_base = OTHER; note = 2'-O-methyluridine-3'-phosphate
  modified_base 6: mod_base = OTHER; note = 2'-O-hexadecyl-guanosine-3'-phosphate
  modified_base 7: mod_base = OTHER; note = 2'-deoxy-2'-fluorocytidine-3'-phosphate
  modified_base 8: mod_base = OTHER; note = 2'-O-methyladenosine-3'-phosphate
  modified_base 9: mod_base = OTHER; note = 2'-deoxy-2'-fluoroguanosine-3'-phosphate
  modified_base 10: mod_base = OTHER; note = 2'-deoxy-2'-fluorouridine-3'-phosphate
  modified_base 11: mod_base = OTHER; note = 2'-deoxy-2'-fluoroguanosine-3'-phosphate
  modified_base 12: mod_base = OTHER; note = 2'-O-methyladenosine-3'-phosphate
  modified_base 13: mod_base = OTHER; note = 2'-O-methylcytidine-3'-phosphate
  modified_base 14: mod_base = OTHER; note = 2'-O-methylguanosine-3'-phosphate
  modified_base 15: mod_base = OTHER; note = 2'-O-methyladenosine-3'-phosphate
  modified_base 16: mod_base = OTHER; note = 2'-O-methylcytidine-3'-phosphate
  modified_base 17: mod_base = OTHER; note = 2'-O-methylcytidine-3'-phosphate
  modified_base 18: mod_base = OTHER; note = 2'-O-methyladenosine-3'-phosphate
  modified_base 19: mod_base = OTHER; note = 2'-O-methylcytidine-3'-phosphorothioate
  modified_base 20: mod_base = OTHER; note = 2'-O-methyluridine-3'-phosphorothioate
  modified_base 21: mod_base = OTHER; note = 2'-O-methyladenosine
ctgctgcagtgacgaccacta

SEQ ID NO: 3980 - RNA, 21 nt, synthetic construct
  source 1..21: mol_type = other RNA
  modified_base 1: mod_base = OTHER; note = 2'-O-methylcytidine-3'-phosphorothioate
  modified_base 2: mod_base = OTHER; note = 2'-O-methylguanosine-3'-phosphorothioate
  modified_base 3: mod_base = OTHER; note = 2'-O-methyladenosine-3'-phosphate
  modified_base 4: mod_base = OTHER; note = 2'-O-methylcytidine-3'-phosphate
  modified_base 5: mod_base = OTHER; note = 2'-O-methylcytidine-3'-phosphate
  modified_base 6: mod_base = OTHER; note = 2'-O-hexadecyl-adenosine-3'-phosphate
  modified_base 7: mod_base = OTHER; note = 2'-deoxy-2'-fluorocytidine-3'-phosphate
  modified_base 8: mod_base = OTHER; note = 2'-O-methyladenosine-3'-phosphate
  modified_base 9: mod_base = OTHER; note = 2'-deoxy-2'-fluoroguanosine-3'-phosphate
  modified_base 10: mod_base = OTHER; note = 2'-deoxy-2'-fluoroadenosine-3'-phosphate
  modified_base 11: mod_base = OTHER; note = 2'-deoxy-2'-fluoroguanosine-3'-phosphate
  modified_base 12: mod_base = OTHER; note = 2'-O-methylcytidine-3'-phosphate
  modified_base 13: mod_base = OTHER; note = 2'-O-methyluridine-3'-phosphate
  modified_base 14: mod_base = OTHER; note = 2'-O-methylguanosine-3'-phosphate
  modified_base 15: mod_base = OTHER; note = 2'-O-methylguanosine-3'-phosphate
  modified_base 16: mod_base = OTHER; note = 2'-O-methyladenosine-3'-phosphate
  modified_base 17: mod_base = OTHER; note = 2'-O-methylguanosine-3'-phosphate
  modified_base 18: mod_base = OTHER; note = 2'-O-methyladenosine-3'-phosphate
  modified_base 19: mod_base = OTHER; note = 2'-O-methylcytidine-3'-phosphorothioate
  modified_base 20: mod_base = OTHER; note = 2'-O-methylguanosine-3'-phosphorothioate
  modified_base 21: mod_base = OTHER; note = 2'-O-methyladenosine
cgaccacagagctggagacga

SEQ ID NO: 3981 - RNA, 21 nt, synthetic construct
  source 1..21: mol_type = other RNA
  modified_base 1: mod_base = OTHER; note = 2'-O-methylguanosine-3'-phosphorothioate
  modified_base 2: mod_base = OTHER; note = 2'-O-methylcytidine-3'-phosphorothioate
  modified_base 3: mod_base = OTHER; note = 2'-O-methylcytidine-3'-phosphate
  modified_base 4: mod_base = OTHER; note = 2'-O-methylcytidine-3'-phosphate
  modified_base 5: mod_base = OTHER; note = 2'-O-methyluridine-3'-phosphate
  modified_base 6: mod_base = OTHER; note = 2'-O-hexadecyl-guanosine-3'-phosphate
  modified_base 7: mod_base = OTHER; note = 2'-deoxy-2'-fluorouridine-3'-phosphate
  modified_base 8: mod_base = OTHER; note = 2'-O-methyluridine-3'-phosphate
  modified_base 9: mod_base = OTHER; note = 2'-deoxy-2'-fluorocytidine-3'-phosphate
  modified_base 10: mod_base = OTHER; note = 2'-deoxy-2'-fluorouridine-3'-phosphate
  modified_base 11: mod_base = OTHER; note = 2'-deoxy-2'-fluorocytidine-3'-phosphate
  modified_base 12: mod_base = OTHER; note = 2'-O-methyladenosine-3'-phosphate
  modified_base 13: mod_base = OTHER; note = 2'-O-methyladenosine-3'-phosphate
  modified_base 14: mod_base = OTHER; note = 2'-O-methylcytidine-3'-phosphate
  modified_base 15: mod_base = OTHER; note = 2'-O-methylguanosine-3'-phosphate
  modified_base 16: mod_base = OTHER; note = 2'-O-methylcytidine-3'-phosphate
  modified_base 17: mod_base = OTHER; note = 2'-O-methylcytidine-3'-phosphate
  modified_base 18: mod_base = OTHER; note = 2'-O-methylguanosine-3'-phosphate
  modified_base 19: mod_base = OTHER; note = 2'-O-methylcytidine-3'-phosphorothioate
  modified_base 20: mod_base = OTHER; note = 2'-O-methyladenosine-3'-phosphorothioate
  modified_base 21: mod_base = OTHER; note = 2'-O-methyladenosine
gccctgttctcaacgccgcaa

SEQ ID NO: 3982 - RNA, 21 nt, synthetic construct
  source 1..21: mol_type = other RNA
  modified_base 1: mod_base = OTHER; note = 2'-O-methylcytidine-3'-phosphorothioate
  modified_base 2: mod_base = OTHER; note = 2'-O-methylcytidine-3'-phosphorothioate
  modified_base 3: mod_base = OTHER; note = 2'-O-methyluridine-3'-phosphate
  modified_base 4: mod_base = OTHER; note = 2'-O-methylcytidine-3'-phosphate
  modified_base 5: mod_base = OTHER; note = 2'-O-methyluridine-3'-phosphate
  modified_base 6: mod_base = OTHER; note = 2'-O-hexadecyl-cytidine-3'-phosphate
  modified_base 7: mod_base = OTHER; note = 2'-deoxy-2'-fluoroadenosine-3'-phosphate
  modified_base 8: mod_base = OTHER; note = 2'-O-methylguanosine-3'-phosphate
  modified_base 9: mod_base = OTHER; note = 2'-deoxy-2'-fluoroadenosine-3'-phosphate
  modified_base 10: mod_base = OTHER; note = 2'-deoxy-2'-fluoroadenosine-3'-phosphate
  modified_base 11: mod_base = OTHER; note = 2'-deoxy-2'-fluoroguanosine-3'-phosphate
  modified_base 12: mod_base = OTHER; note = 2'-O-methylguanosine-3'-phosphate
  modified_base 13: mod_base = OTHER; note = 2'-O-methyladenosine-3'-phosphate
  modified_base 14: mod_base = OTHER; note = 2'-O-methylcytidine-3'-phosphate
  modified_base 15: mod_base = OTHER; note = 2'-O-methyluridine-3'-phosphate
  modified_base 16: mod_base = OTHER; note = 2'-O-methylguanosine-3'-phosphate
  modified_base 17: mod_base = OTHER; note = 2'-O-methyladenosine-3'-phosphate
  modified_base 18: mod_base = OTHER; note = 2'-O-methylcytidine-3'-phosphate
  modified_base 19: mod_base = OTHER; note = 2'-O-methyladenosine-3'-phosphorothioate
  modified_base 20: mod_base = OTHER; note = 2'-O-methyluridine-3'-phosphorothioate
  modified_base 21: mod_base = OTHER; note = 2'-O-methyladenosine
cctctcagaaggactgacata

SEQ ID NO: 3983 - RNA, 21 nt, synthetic construct
  source 1..21: mol_type = other RNA
  modified_base 1: mod_base = OTHER; note = 2'-O-methylcytidine-3'-phosphorothioate
  modified_base 2: mod_base = OTHER; note = 2'-O-methyladenosine-3'-phosphorothioate
  modified_base 3: mod_base = OTHER; note = 2'-O-methylguanosine-3'-phosphate
  modified_base 4: mod_base = OTHER; note = 2'-O-methyladenosine-3'-phosphate
  modified_base 5: mod_base = OTHER; note = 2'-O-methyluridine-3'-phosphate
  modified_base 6: mod_base = OTHER; note = 2'-O-hexadecyl-adenosine-3'-phosphate
  modified_base 7: mod_base = OTHER; note = 2'-deoxy-2'-fluorocytidine-3'-phosphate
  modified_base 8: mod_base = OTHER; note = 2'-O-methyladenosine-3'-phosphate
  modified_base 9: mod_base = OTHER; note = 2'-deoxy-2'-fluorocytidine-3'-phosphate
  modified_base 10: mod_base = OTHER; note = 2'-deoxy-2'-fluoroadenosine-3'-phosphate
  modified_base 11: mod_base = OTHER; note = 2'-deoxy-2'-fluoroadenosine-3'-phosphate
  modified_base 12: mod_base = OTHER; note = 2'-O-methylguanosine-3'-phosphate
  modified_base 13: mod_base = OTHER; note = 2'-O-methylcytidine-3'-phosphate
  modified_base 14: mod_base = OTHER; note = 2'-O-methyladenosine-3'-phosphate
  modified_base 15: mod_base = OTHER; note = 2'-O-methylcytidine-3'-phosphate
  modified_base 16: mod_base = OTHER; note = 2'-O-methylcytidine-3'-phosphate
  modified_base 17: mod_base = OTHER; note = 2'-O-methylcytidine-3'-phosphate
  modified_base 18: mod_base = OTHER; note = 2'-O-methyluridine-3'-phosphate
  modified_base 19: mod_base = OTHER; note = 2'-O-methyluridine-3'-phosphorothioate
  modified_base 20: mod_base = OTHER; note = 2'-O-methylguanosine-3'-phosphorothioate
  modified_base 21: mod_base = OTHER; note = 2'-O-methyladenosine
cagatacacaagcacccttga

SEQ ID NO: 3984 - RNA, 21 nt, synthetic construct
  source 1..21: mol_type = other RNA
  modified_base 1: mod_base = OTHER; note = 2'-O-methylguanosine-3'-phosphorothioate
  modified_base 2: mod_base = OTHER; note = 2'-O-methylcytidine-3'-phosphorothioate
  modified_base 3: mod_base = OTHER; note = 2'-O-methyluridine-3'-phosphate
  modified_base 4: mod_base = OTHER; note = 2'-O-methylcytidine-3'-phosphate
  modified_base 5: mod_base = OTHER; note = 2'-O-methylcytidine-3'-phosphate
  modified_base 6: mod_base = OTHER; note = 2'-O-hexadecyl-adenosine-3'-phosphate
  modified_base 7: mod_base = OTHER; note = 2'-deoxy-2'-fluorocytidine-3'-phosphate
  modified_base 8: mod_base = OTHER; note = 2'-O-methyladenosine-3'-phosphate
  modified_base 9: mod_base = OTHER; note = 2'-deoxy-2'-fluoroguanosine-3'-phosphate
  modified_base 10: mod_base = OTHER; note = 2'-deoxy-2'-fluoroadenosine-3'-phosphate
  modified_base 11: mod_base = OTHER; note = 2'-deoxy-2'-fluoroadenosine-3'-phosphate
  modified_base 12: mod_base = OTHER; note = 2'-O-methylcytidine-3'-phosphate
  modified_base 13: mod_base = OTHER; note = 2'-O-methylcytidine-3'-phosphate
  modified_base 14: mod_base = OTHER; note = 2'-O-methylcytidine-3'-phosphate
  modified_base 15: mod_base = OTHER; note = 2'-O-methyladenosine-3'-phosphate
  modified_base 16: mod_base = OTHER; note = 2'-O-methylcytidine-3'-phosphate
  modified_base 17: mod_base = OTHER; note = 2'-O-methyluridine-3'-phosphate
  modified_base 18: mod_base = OTHER; note = 2'-O-methylguanosine-3'-phosphate
  modified_base 19: mod_base = OTHER; note = 2'-O-methyluridine-3'-phosphorothioate
  modified_base 20: mod_base = OTHER; note = 2'-O-methylcytidine-3'-phosphorothioate
  modified_base 21: mod_base = OTHER; note = 2'-O-methyladenosine
gctccacagaacccactgtca

SEQ ID NO: 3985 - RNA, 21 nt, synthetic construct
  source 1..21: mol_type = other RNA
  modified_base 1: mod_base = OTHER; note = 2'-O-methylcytidine-3'-phosphorothioate
  modified_base 2: mod_base = OTHER; note = 2'-O-methyladenosine-3'-phosphorothioate
  modified_base 3: mod_base = OTHER; note = 2'-O-methylcytidine-3'-phosphate
  modified_base 4: mod_base = OTHER; note = 2'-O-methylcytidine-3'-phosphate
  modified_base 5: mod_base = OTHER; note = 2'-O-methylcytidine-3'-phosphate
  modified_base 6: mod_base = OTHER; note = 2'-O-hexadecyl-uridine-3'-phosphate
  modified_base 7: mod_base = OTHER; note = 2'-deoxy-2'-fluorouridine-3'-phosphate
  modified_base 8: mod_base = OTHER; note = 2'-O-methylcytidine-3'-phosphate
  modified_base 9: mod_base = OTHER; note = 2'-deoxy-2'-fluorocytidine-3'-phosphate
  modified_base 10: mod_base = OTHER; note = 2'-deoxy-2'-fluoroadenosine-3'-phosphate
  modified_base 11: mod_base = OTHER; note = 2'-deoxy-2'-fluoroadenosine-3'-phosphate
  modified_base 12: mod_base = OTHER; note = 2'-O-methylcytidine-3'-phosphate
  modified_base 13: mod_base = OTHER; note = 2'-O-methyladenosine-3'-phosphate
  modified_base 14: mod_base = OTHER; note = 2'-O-methylcytidine-3'-phosphate
  modified_base 15: mod_base = OTHER; note = 2'-O-methylguanosine-3'-phosphate
  modified_base 16: mod_base = OTHER; note = 2'-O-methylcytidine-3'-phosphate
  modified_base 17: mod_base = OTHER; note = 2'-O-methyluridine-3'-phosphate
  modified_base 18: mod_base = OTHER; note = 2'-O-methylcytidine-3'-phosphate
  modified_base 19: mod_base = OTHER; note = 2'-O-methyladenosine-3'-phosphorothioate
  modified_base 20: mod_base = OTHER; note = 2'-O-methylguanosine-3'-phosphorothioate
  modified_base 21: mod_base = OTHER; note = 2'-O-methyladenosine
cacccttccaacacgctcaga

SEQ ID NO: 3986 - RNA, 21 nt, synthetic construct
  source 1..21: mol_type = other RNA
  modified_base 1: mod_base = OTHER; note = 2'-O-methylcytidine-3'-phosphorothioate
  modified_base 2: mod_base = OTHER; note = 2'-O-methyladenosine-3'-phosphorothioate
  modified_base 3: mod_base = OTHER; note = 2'-O-methyladenosine-3'-phosphate
  modified_base 4: mod_base = OTHER; note = 2'-O-methylcytidine-3'-phosphate
  modified_base 5: mod_base = OTHER; note = 2'-O-methyladenosine-3'-phosphate
  modified_base 6: mod_base = OTHER; note = 2'-O-hexadecyl-adenosine-3'-phosphate
  modified_base 7: mod_base = OTHER; note = 2'-deoxy-2'-fluorocytidine-3'-phosphate
  modified_base 8: mod_base = OTHER; note = 2'-O-methyladenosine-3'-phosphate
  modified_base 9: mod_base = OTHER; note = 2'-deoxy-2'-fluoroadenosine-3'-phosphate
  modified_base 10: mod_base = OTHER; note = 2'-deoxy-2'-fluorouridine-3'-phosphate
  modified_base 11: mod_base = OTHER; note = 2'-deoxy-2'-fluoroguanosine-3'-phosphate
  modified_base 12: mod_base = OTHER; note = 2'-O-methylguanosine-3'-phosphate
  modified_base 13: mod_base = OTHER; note = 2'-O-methylcytidine-3'-phosphate
  modified_base 14: mod_base = OTHER; note = 2'-O-methyladenosine-3'-phosphate
  modified_base 15: mod_base = OTHER; note = 2'-O-methyladenosine-3'-phosphate
  modified_base 16: mod_base = OTHER; note = 2'-O-methylcytidine-3'-phosphate
  modified_base 17: mod_base = OTHER; note = 2'-O-methylcytidine-3'-phosphate
  modified_base 18: mod_base = OTHER; note = 2'-O-methyluridine-3'-phosphate
  modified_base 19: mod_base = OTHER; note = 2'-O-methylcytidine-3'-phosphorothioate
  modified_base 20: mod_base = OTHER; note = 2'-O-methylcytidine-3'-phosphorothioate
  modified_base 21: mod_base = OTHER; note = 2'-O-methyladenosine
caacaacaatggcaacctcca

SEQ ID NO: 3987 - RNA, 21 nt, synthetic construct
  source 1..21: mol_type = other RNA
  modified_base 1: mod_base = OTHER; note = 2'-O-methylcytidine-3'-phosphorothioate
  modified_base 2: mod_base = OTHER; note = 2'-O-methylguanosine-3'-phosphorothioate
  modified_base 3: mod_base = OTHER; note = 2'-O-methylcytidine-3'-phosphate
  modified_base 4: mod_base = OTHER; note = 2'-O-methyluridine-3'-phosphate
  modified_base 5: mod_base = OTHER; note = 2'-O-methyluridine-3'-phosphate
  modified_base 6: mod_base = OTHER; note = 2'-O-hexadecyl-cytidine-3'-phosphate
  modified_base 7: mod_base = OTHER; note = 2'-deoxy-2'-fluorocytidine-3'-phosphate
  modified_base 8: mod_base = OTHER; note = 2'-O-methyladenosine-3'-phosphate
  modified_base 9: mod_base = OTHER; note = 2'-deoxy-2'-fluoroadenosine-3'-phosphate
  modified_base 10: mod_base = OTHER; note = 2'-deoxy-2'-fluoroadenosine-3'-phosphate
  modified_base 11: mod_base = OTHER; note = 2'-deoxy-2'-fluoroguanosine-3'-phosphate
  modified_base 12: mod_base = OTHER; note = 2'-O-methyladenosine-3'-phosphate
  modified_base 13: mod_base = OTHER; note = 2'-O-methylguanosine-3'-phosphate
  modified_base 14: mod_base = OTHER; note = 2'-O-methylcytidine-3'-phosphate
  modified_base 15: mod_base = OTHER; note = 2'-O-methylcytidine-3'-phosphate
  modified_base 16: mod_base = OTHER; note = 2'-O-methylguanosine-3'-phosphate
  modified_base 17: mod_base = OTHER; note = 2'-O-methylcytidine-3'-phosphate
  modified_base 18: mod_base = OTHER; note = 2'-O-methyluridine-3'-phosphate
  modified_base 19: mod_base = OTHER; note = 2'-O-methylguanosine-3'-phosphorothioate
  modified_base 20: mod_base = OTHER; note = 2'-O-methyladenosine-3'-phosphorothioate
  modified_base 21: mod_base = OTHER; note = 2'-O-methyladenosine
cgcttccaaagagccgctgaa

SEQ ID NO: 3988 - RNA, 21 nt, synthetic construct
  source 1..21: mol_type = other RNA
  modified_base 1: mod_base = OTHER; note = 2'-O-methylguanosine-3'-phosphorothioate
  modified_base 2: mod_base = OTHER; note = 2'-O-methylcytidine-3'-phosphorothioate
  modified_base 3: mod_base = OTHER; note = 2'-O-methylguanosine-3'-phosphate
  modified_base 4: mod_base = OTHER; note = 2'-O-methylcytidine-3'-phosphate
  modified_base 5: mod_base = OTHER; note = 2'-O-methylcytidine-3'-phosphate
  modified_base 6: mod_base = OTHER; note = 2'-O-hexadecyl-adenosine-3'-phosphate
  modified_base 7: mod_base = OTHER; note = 2'-deoxy-2'-fluoroadenosine-3'-phosphate
  modified_base 8: mod_base = OTHER; note = 2'-O-methylcytidine-3'-phosphate
  modified_base 9: mod_base = OTHER; note = 2'-deoxy-2'-fluoroadenosine-3'-phosphate
  modified_base 10: mod_base = OTHER; note = 2'-deoxy-2'-fluorocytidine-3'-phosphate
  modified_base 11: mod_base = OTHER; note = 2'-deoxy-2'-fluorouridine-3'-phosphate
  modified_base 12: mod_base = OTHER; note = 2'-O-methylcytidine-3'-phosphate
  modified_base 13: mod_base = OTHER; note = 2'-O-methyladenosine-3'-phosphate
  modified_base 14: mod_base = OTHER; note = 2'-O-methylcytidine-3'-phosphate
  modified_base 15: mod_base = OTHER; note = 2'-O-methylguanosine-3'-phosphate
  modified_base 16: mod_base = OTHER; note = 2'-O-methyladenosine-3'-phosphate
  modified_base 17: mod_base = OTHER; note = 2'-O-methylguanosine-3'-phosphate
  modified_base 18: mod_base = OTHER; note = 2'-O-methylcytidine-3'-phosphate
  modified_base 19: mod_base = OTHER; note = 2'-O-methylguanosine-3'-phosphorothioate
  modified_base 20: mod_base = OTHER; note = 2'-O-methyladenosine-3'-phosphorothioate
  modified_base 21: mod_base = OTHER; note = 2'-O-methyladenosine
gcgccaacactcacgagcgaa

SEQ ID NO: 3989 - RNA, 21 nt, synthetic construct
  source 1..21: mol_type = other RNA
  modified_base 1: mod_base = OTHER; note = 2'-O-methylguanosine-3'-phosphorothioate
  modified_base 2: mod_base = OTHER; note = 2'-O-methyluridine-3'-phosphorothioate
  modified_base 3: mod_base = OTHER; note = 2'-O-methylcytidine-3'-phosphate
  modified_base 4: mod_base = OTHER; note = 2'-O-methylcytidine-3'-phosphate
  modified_base 5: mod_base = OTHER; note = 2'-O-methyladenosine-3'-phosphate
  modified_base 6: mod_base = OTHER; note = 2'-O-hexadecyl-cytidine-3'-phosphate
  modified_base 7: mod_base = OTHER; note = 2'-deoxy-2'-fluorocytidine-3'-phosphate
  modified_base 8: mod_base = OTHER; note = 2'-O-methyluridine-3'-phosphate
  modified_base 9: mod_base = OTHER; note = 2'-deoxy-2'-fluorocytidine-3'-phosphate
  modified_base 10: mod_base = OTHER; note = 2'-deoxy-2'-fluorouridine-3'-phosphate
  modified_base 11: mod_base = OTHER; note = 2'-deoxy-2'-fluorocytidine-3'-phosphate
  modified_base 12: mod_base = OTHER; note = 2'-O-methyladenosine-3'-phosphate
  modified_base 13: mod_base = OTHER; note = 2'-O-methylguanosine-3'-phosphate
  modified_base 14: mod_base = OTHER; note = 2'-O-methylguanosine-3'-phosphate
  modified_base 15: mod_base = OTHER; note = 2'-O-methylcytidine-3'-phosphate
  modified_base 16: mod_base = OTHER; note = 2'-O-methylcytidine-3'-phosphate
  modified_base 17: mod_base = OTHER; note = 2'-O-methylguanosine-3'-phosphate
  modified_base 18: mod_base = OTHER; note = 2'-O-methyladenosine-3'-phosphate
  modified_base 19: mod_base = OTHER; note = 2'-O-methylguanosine-3'-phosphorothioate
  modified_base 20: mod_base = OTHER; note = 2'-O-methyladenosine-3'-phosphorothioate
  modified_base 21: mod_base = OTHER; note = 2'-O-methyladenosine
gtccacctctcaggccgagaa

SEQ ID NO: 3990 - RNA, 21 nt, synthetic construct
  source 1..21: mol_type = other RNA
  modified_base 1: mod_base = OTHER; note = 2'-O-methylcytidine-3'-phosphorothioate
  modified_base 2: mod_base = OTHER; note = 2'-O-methyladenosine-3'-phosphorothioate
  modified_base 3: mod_base = OTHER; note = 2'-O-methylguanosine-3'-phosphate
  modified_base 4: mod_base = OTHER; note = 2'-O-methylguanosine-3'-phosphate
  modified_base 5: mod_base = OTHER; note = 2'-O-methyladenosine-3'-phosphate
  modified_base 6: mod_base = OTHER; note = 2'-O-hexadecyl-cytidine-3'-phosphate
  modified_base 7: mod_base = OTHER; note = 2'-deoxy-2'-fluoroadenosine-3'-phosphate
  modified_base 8: mod_base = OTHER; note = 2'-O-methylguanosine-3'-phosphate
  modified_base 9: mod_base = OTHER; note = 2'-deoxy-2'-fluoroadenosine-3'-phosphate
  modified_base 10: mod_base = OTHER; note = 2'-deoxy-2'-fluoroguanosine-3'-phosphate
  modified_base 11: mod_base = OTHER; note = 2'-deoxy-2'-fluoroadenosine-3'-phosphate
  modified_base 12: mod_base = OTHER; note = 2'-O-methylcytidine-3'-phosphate
  modified_base 13: mod_base = OTHER; note = 2'-O-methylguanosine-3'-phosphate
  modified_base 14: mod_base = OTHER; note = 2'-O-methyladenosine-3'-phosphate
  modified_base 15: mod_base = OTHER; note = 2'-O-methylcytidine-3'-phosphate
  modified_base 16: mod_base = OTHER; note = 2'-O-methyladenosine-3'-phosphate
  modified_base 17: mod_base = OTHER; note = 2'-O-methyladenosine-3'-phosphate
  modified_base 18: mod_base = OTHER; note = 2'-O-methyluridine-3'-phosphate
  modified_base 19: mod_base = OTHER; note = 2'-O-methylguanosine-3'-phosphorothioate
  modified_base 20: mod_base = OTHER; note = 2'-O-methyladenosine-3'-phosphorothioate
  modified_base 21: mod_base = OTHER; note = 2'-O-methyladenosine
caggacagagacgacaatgaa

SEQ ID NO: 3991 - RNA, 21 nt, synthetic construct
  source 1..21: mol_type = other RNA
  modified_base 1: mod_base = OTHER; note = 2'-O-methylcytidine-3'-phosphorothioate
  modified_base 2: mod_base = OTHER; note = 2'-O-methyluridine-3'-phosphorothioate
  modified_base 3: mod_base = OTHER; note = 2'-O-methyluridine-3'-phosphate
  modified_base 4: mod_base = OTHER; note = 2'-O-methylguanosine-3'-phosphate
  modified_base 5: mod_base = OTHER; note = 2'-O-methyladenosine-3'-phosphate
  modified_base 6: mod_base = OTHER; note = 2'-O-hexadecyl-cytidine-3'-phosphate
  modified_base 7: mod_base = OTHER; note = 2'-deoxy-2'-fluorouridine-3'-phosphate
  modified_base 8: mod_base = OTHER; note = 2'-O-methyladenosine-3'-phosphate
  modified_base 9: mod_base = OTHER; note = 2'-deoxy-2'-fluoroadenosine-3'-phosphate
  modified_base 10: mod_base = OTHER; note = 2'-deoxy-2'-fluorocytidine-3'-phosphate
  modified_base 11: mod_base = OTHER; note = 2'-deoxy-2'-fluoroadenosine-3'-phosphate
  modified_base 12: mod_base = OTHER; note = 2'-O-methylcytidine-3'-phosphate
  modified_base 13: mod_base = OTHER; note = 2'-O-methylcytidine-3'-phosphate
  modified_base 14: mod_base = OTHER; note = 2'-O-methyladenosine-3'-phosphate
  modified_base 15: mod_base = OTHER; note = 2'-O-methylcytidine-3'-phosphate
  modified_base 16: mod_base = OTHER; note = 2'-O-methylcytidine-3'-phosphate
  modified_base 17: mod_base = OTHER; note = 2'-O-methyladenosine-3'-phosphate
  modified_base 18: mod_base = OTHER; note = 2'-O-methylcytidine-3'-phosphate
  modified_base 19: mod_base = OTHER; note = 2'-O-methylcytidine-3'-phosphorothioate
  modified_base 20: mod_base = OTHER; note = 2'-O-methyladenosine-3'-phosphorothioate
  modified_base 21: mod_base = OTHER; note = 2'-O-methyladenosine
cttgactaacaccaccaccaa

SEQ ID NO: 3992 - RNA, 21 nt, synthetic construct
  source 1..21: mol_type = other RNA
  modified_base 1: mod_base = OTHER; note = 2'-O-methylcytidine-3'-phosphorothioate
  modified_base 2: mod_base = OTHER; note = 2'-O-methyluridine-3'-phosphorothioate
  modified_base 3: mod_base = OTHER; note = 2'-O-methylguanosine-3'-phosphate
  modified_base 4: mod_base = OTHER; note = 2'-O-methyluridine-3'-phosphate
  modified_base 5: mod_base = OTHER; note = 2'-O-methylcytidine-3'-phosphate
  modified_base 6: mod_base = OTHER; note = 2'-O-hexadecyl-adenosine-3'-phosphate
  modified_base 7: mod_base = OTHER; note = 2'-deoxy-2'-fluoroadenosine-3'-phosphate
  modified_base 8: mod_base = OTHER; note = 2'-O-methylcytidine-3'-phosphate
  modified_base 9: mod_base = OTHER; note = 2'-deoxy-2'-fluorocytidine-3'-phosphate
  modified_base 10: mod_base = OTHER; note = 2'-deoxy-2'-fluoroguanosine-3'-phosphate
  modified_base 11: mod_base = OTHER; note = 2'-deoxy-2'-fluoroadenosine-3'-phosphate
  modified_base 12: mod_base = OTHER; note = 2'-O-methyladenosine-3'-phosphate
  modified_base 13: mod_base = OTHER; note = 2'-O-methylguanosine-3'-phosphate
  modified_base 14: mod_base = OTHER; note = 2'-O-methyluridine-3'-phosphate
  modified_base 15: mod_base = OTHER; note = 2'-O-methylguanosine-3'-phosphate
  modified_base 16: mod_base = OTHER; note = 2'-O-methyluridine-3'-phosphate
  modified_base 17: mod_base = OTHER; note = 2'-O-methylguanosine-3'-phosphate
  modified_base 18: mod_base = OTHER; note = 2'-O-methyladenosine-3'-phosphate
  modified_base 19: mod_base = OTHER; note = 2'-O-methylguanosine-3'-phosphorothioate
  modified_base 20: mod_base = OTHER; note = 2'-O-methyluridine-3'-phosphorothioate
  modified_base 21: mod_base = OTHER; note = 2'-O-methyladenosine
ctgtcaaccgaagtgtgagta

SEQ ID NO: 3993 - RNA, 21 nt, synthetic construct
  source 1..21: mol_type = other RNA
  modified_base 1: mod_base = OTHER; note = 2'-O-methyladenosine-3'-phosphorothioate
  modified_base 2: mod_base = OTHER; note = 2'-O-methylguanosine-3'-phosphorothioate
  modified_base 3: mod_base = OTHER; note = 2'-O-methyladenosine-3'-phosphate
  modified_base 4: mod_base = OTHER; note = 2'-O-methylguanosine-3'-phosphate
  modified_base 5: mod_base = OTHER; note = 2'-O-methyluridine-3'-phosphate
  modified_base 6: mod_base = OTHER; note = 2'-O-hexadecyl-guanosine-3'-phosphate
  modified_base 7: mod_base = OTHER; note = 2'-deoxy-2'-fluoroguanosine-3'-phosphate
  modified_base 8: mod_base = OTHER; note = 2'-O-methyluridine-3'-phosphate
  modified_base 9: mod_base = OTHER; note = 2'-deoxy-2'-fluorouridine-3'-phosphate
  modified_base 10: mod_base = OTHER; note = 2'-deoxy-2'-fluorouridine-3'-phosphate
  modified_base 11: mod_base = OTHER; note = 2'-deoxy-2'-fluoroguanosine-3'-phosphate
  modified_base 12: mod_base = OTHER; note = 2'-O-methyladenosine-3'-phosphate
  modified_base 13: mod_base = OTHER; note = 2'-O-methylcytidine-3'-phosphate
  modified_base 14: mod_base = OTHER; note = 2'-O-methylguanosine-3'-phosphate
  modified_base 15: mod_base = OTHER; note = 2'-O-methyluridine-3'-phosphate
  modified_base 16: mod_base = OTHER; note = 2'-O-methylguanosine-3'-phosphate
  modified_base 17: mod_base = OTHER; note = 2'-O-methylguanosine-3'-phosphate
  modified_base 18: mod_base = OTHER; note = 2'-O-methyladenosine-3'-phosphate
  modified_base 19: mod_base = OTHER; note = 2'-O-methylcytidine-3'-phosphorothioate
  modified_base 20: mod_base = OTHER; note = 2'-O-methyluridine-3'-phosphorothioate
  modified_base 21: mod_base = OTHER; note = 2'-O-methyladenosine
agagtggtttgacgtggacta

SEQ ID NO: 3994 - RNA, 21 nt, synthetic construct
  source 1..21: mol_type = other RNA
  modified_base 1: mod_base = OTHER; note = 2'-O-methylguanosine-3'-phosphorothioate
  modified_base 2: mod_base = OTHER; note = 2'-O-methylguanosine-3'-phosphorothioate
  modified_base 3: mod_base = OTHER; note = 2'-O-methyladenosine-3'-phosphate
  modified_base 4: mod_base = OTHER; note = 2'-O-methyladenosine-3'-phosphate
  modified_base 5: mod_base = OTHER; note = 2'-O-methyladenosine-3'-phosphate
  modified_base 6: mod_base = OTHER; note = 2'-O-hexadecyl-cytidine-3'-phosphate
  modified_base 7: mod_base = OTHER; note = 2'-deoxy-2'-fluorouridine-3'-phosphate
  modified_base 8: mod_base = OTHER; note = 2'-O-methyluridine-3'-phosphate
  modified_base 9: mod_base = OTHER; note = 2'-deoxy-2'-fluorouridine-3'-phosphate
  modified_base 10: mod_base = OTHER; note = 2'-deoxy-2'-fluorouridine-3'-phosphate
  modified_base 11: mod_base = OTHER; note = 2'-deoxy-2'-fluoroguanosine-3'-phosphate
  modified_base 12: mod_base = OTHER; note = 2'-O-methyladenosine-3'-phosphate
  modified_base 13: mod_base = OTHER; note = 2'-O-methyladenosine-3'-phosphate
  modified_base 14: mod_base = OTHER; note = 2'-O-methyladenosine-3'-phosphate
  modified_base 15: mod_base = OTHER; note = 2'-O-methyladenosine-3'-phosphate
  modified_base 16: mod_base = OTHER; note = 2'-O-methylcytidine-3'-phosphate
  modified_base 17: mod_base = OTHER; note = 2'-O-methyladenosine-3'-phosphate
  modified_base 18: mod_base = OTHER; note = 2'-O-methyluridine-3'-phosphate
  modified_base 19: mod_base = OTHER; note = 2'-O-methylcytidine-3'-phosphorothioate
  modified_base 20: mod_base = OTHER; note = 2'-O-methyladenosine-3'-phosphorothioate
  modified_base 21: mod_base = OTHER; note = 2'-O-methyladenosine
ggaaacttttgaaaacatcaa

SEQ ID NO: 3995 - RNA, 21 nt, synthetic construct
  source 1..21: mol_type = other RNA
  modified_base 1: mod_base = OTHER; note = 2'-O-methylguanosine-3'-phosphorothioate
  modified_base 2: mod_base = OTHER; note = 2'-O-methylcytidine-3'-phosphorothioate
  modified_base 3: mod_base = OTHER; note = 2'-O-methyladenosine-3'-phosphate
  modified_base 4: mod_base = OTHER; note = 2'-O-methylcytidine-3'-phosphate
  modified_base 5: mod_base = OTHER; note = 2'-O-methylcytidine-3'-phosphate
  modified_base 6: mod_base = OTHER; note = 2'-O-hexadecyl-adenosine-3'-phosphate
  modified_base 7: mod_base = OTHER; note = 2'-deoxy-2'-fluoroadenosine-3'-phosphate
  modified_base 8: mod_base = OTHER; note = 2'-O-methyladenosine-3'-phosphate
  modified_base 9: mod_base = OTHER; note = 2'-deoxy-2'-fluoroguanosine-3'-phosphate
  modified_base 10: mod_base = OTHER; note = 2'-deoxy-2'-fluoroadenosine-3'-phosphate
  modified_base 11: mod_base = OTHER; note = 2'-deoxy-2'-fluoroguanosine-3'-phosphate
  modified_base 12: mod_base = OTHER; note = 2'-O-methylcytidine-3'-phosphate
  modified_base 13: mod_base = OTHER; note = 2'-O-methyladenosine-3'-phosphate
  modified_base 14: mod_base = OTHER; note = 2'-O-methyluridine-3'-phosphate
  modified_base 15: mod_base = OTHER; note = 2'-O-methyladenosine-3'-phosphate
  modified_base 16: mod_base = OTHER; note = 2'-O-methylguanosine-3'-phosphate
  modified_base 17: mod_base = OTHER; note = 2'-O-methyladenosine-3'-phosphate
  modified_base 18: mod_base = OTHER; note = 2'-O-methylguanosine-3'-phosphate
  modified_base 19: mod_base = OTHER; note = 2'-O-methyluridine-3'-phosphorothioate
  modified_base 20: mod_base = OTHER; note = 2'-O-methylguanosine-3'-phosphorothioate
  modified_base 21: mod_base = OTHER; note = 2'-O-methyladenosine
gcaccaaagagcatagagtga

SEQ ID NO: 3996 - RNA, 21 nt, synthetic construct
  source 1..21: mol_type = other RNA
  modified_base 1: mod_base = OTHER; note = 2'-O-methylcytidine-3'-phosphorothioate
  modified_base 2: mod_base = OTHER; note = 2'-O-methylguanosine-3'-phosphorothioate
  modified_base 3: mod_base = OTHER; note = 2'-O-methyladenosine-3'-phosphate
  modified_base 4: mod_base = OTHER; note = 2'-O-methylguanosine-3'-phosphate
  modified_base 5: mod_base = OTHER; note = 2'-O-methylguanosine-3'-phosphate
  modified_base 6: mod_base = OTHER; note = 2'-O-hexadecyl-uridine-3'-phosphate
  modified_base 7: mod_base = OTHER; note = 2'-deoxy-2'-fluoroadenosine-3'-phosphate
  modified_base 8: mod_base = OTHER; note = 2'-O-methyladenosine-3'-phosphate
  modified_base 9: mod_base = OTHER; note = 2'-deoxy-2'-fluoroguanosine-3'-phosphate
  modified_base 10: mod_base = OTHER; note = 2'-deoxy-2'-fluorocytidine-3'-phosphate
  modified_base 11: mod_base = OTHER; note = 2'-deoxy-2'-fluoroadenosine-3'-phosphate
  modified_base 12: mod_base = OTHER; note = 2'-O-methyluridine-3'-phosphate
  modified_base 13: mod_base = OTHER; note = 2'-O-methylcytidine-3'-phosphate
  modified_base 14: mod_base = OTHER; note = 2'-O-methylguanosine-3'-phosphate
  modified_base 15: mod_base = OTHER; note = 2'-O-methyladenosine-3'-phosphate
  modified_base 16: mod_base = OTHER; note = 2'-O-methylcytidine-3'-phosphate
  modified_base 17: mod_base = OTHER; note = 2'-O-methylcytidine-3'-phosphate
  modified_base 18: mod_base = OTHER; note = 2'-O-methyladenosine-3'-phosphate
  modified_base 19: mod_base = OTHER; note = 2'-O-methylguanosine-3'-phosphorothioate
  modified_base 20: mod_base = OTHER; note = 2'-O-methylguanosine-3'-phosphorothioate
  modified_base 21: mod_base = OTHER; note = 2'-O-methyladenosine
cgaggtaagcatcgaccagga

SEQ ID NO: 3997 - RNA, 21 nt, synthetic construct
  source 1..21: mol_type = other RNA
  modified_base 1: mod_base = OTHER; note = 2'-O-methylcytidine-3'-phosphorothioate
  modified_base 2: mod_base = OTHER; note = 2'-O-methyluridine-3'-phosphorothioate
  modified_base 3: mod_base = OTHER; note = 2'-O-methylguanosine-3'-phosphate
  modified_base 4: mod_base = OTHER; note = 2'-O-methyladenosine-3'-phosphate
  modified_base 5: mod_base = OTHER; note = 2'-O-methylcytidine-3'-phosphate
  modified_base 6: mod_base = OTHER; note = 2'-O-hexadecyl-cytidine-3'-phosphate
  modified_base 7: mod_base = OTHER; note = 2'-deoxy-2'-fluorouridine-3'-phosphate
  modified_base 8: mod_base = OTHER; note = 2'-O-methylguanosine-3'-phosphate
  modified_base 9: mod_base = OTHER; note = 2'-deoxy-2'-fluorocytidine-3'-phosphate
  modified_base 10: mod_base = OTHER; note = 2'-deoxy-2'-fluoroadenosine-3'-phosphate
  modified_base 11: mod_base = OTHER; note = 2'-deoxy-2'-fluoroguanosine-3'-phosphate
  modified_base 12: mod_base = OTHER; note = 2'-O-methylcytidine-3'-phosphate
  modified_base 13: mod_base = OTHER; note = 2'-O-methylcytidine-3'-phosphate
  modified_base 14: mod_base = OTHER; note = 2'-O-methyluridine-3'-phosphate
  modified_base 15: mod_base = OTHER; note = 2'-O-methylguanosine-3'-phosphate
  modified_base 16: mod_base = OTHER; note = 2'-O-methylguanosine-3'-phosphate
  modified_base 17: mod_base = OTHER; note = 2'-O-methyladenosine-3'-phosphate
  modified_base 18: mod_base = OTHER; note = 2'-O-methylguanosine-3'-phosphate
  modified_base 19: mod_base = OTHER; note = 2'-O-methyladenosine-3'-phosphorothioate
  modified_base 20: mod_base = OTHER; note = 2'-O-methylcytidine-3'-phosphorothioate
  modified_base 21: mod_base = OTHER; note = 2'-O-methyladenosine
ctgacctgcagcctggagaca

SEQ ID NO: 3998 - RNA, 21 nt, synthetic construct
  source 1..21: mol_type = other RNA
  modified_base 1: mod_base = OTHER; note = 2'-O-methylcytidine-3'-phosphorothioate
  modified_base 2: mod_base = OTHER; note = 2'-O-methyluridine-3'-phosphorothioate
  modified_base 3: mod_base = OTHER; note = 2'-O-methylguanosine-3'-phosphate
  modified_base 4: mod_base = OTHER; note = 2'-O-methylcytidine-3'-phosphate
  modified_base 5: mod_base = OTHER; note = 2'-O-methyladenosine-3'-phosphate
  modified_base 6: mod_base = OTHER; note = 2'-O-hexadecyl-adenosine-3'-phosphate
  modified_base 7: mod_base = OTHER; note = 2'-deoxy-2'-fluoroguanosine-3'-phosphate
  modified_base 8: mod_base = OTHER; note = 2'-O-methyladenosine-3'-phosphate
  modified_base 9: mod_base = OTHER; note = 2'-deoxy-2'-fluoroadenosine-3'-phosphate
  modified_base 10: mod_base = OTHER; note = 2'-deoxy-2'-fluorocytidine-3'-phosphate
  modified_base 11: mod_base = OTHER; note = 2'-deoxy-2'-fluoroguanosine-3'-phosphate
  modified_base 12: mod_base = OTHER; note = 2'-O-methyladenosine-3'-phosphate
  modified_base 13: mod_base = OTHER; note = 2'-O-methyladenosine-3'-phosphate
  modified_base 14: mod_base = OTHER; note = 2'-O-methylguanosine-3'-phosphate
  modified_base 15: mod_base = OTHER; note = 2'-O-methyladenosine-3'-phosphate
  modified_base 16: mod_base = OTHER; note = 2'-O-methylcytidine-3'-phosphate
  modified_base 17: mod_base = OTHER; note = 2'-O-methylcytidine-3'-phosphate
  modified_base 18: mod_base = OTHER; note = 2'-O-methyladenosine-3'-phosphate
  modified_base 19: mod_base = OTHER; note = 2'-O-methylguanosine-3'-phosphorothioate
  modified_base 20: mod_base = OTHER; note = 2'-O-methyladenosine-3'-phosphorothioate
  modified_base 21: mod_base = OTHER; note = 2'-O-methyladenosine
ctgcaagaacgaagaccagaa

SEQ ID NO: 3999 - RNA, 21 nt, synthetic construct
  source 1..21: mol_type = other RNA
  modified_base 1: mod_base = OTHER; note = 2'-O-methyluridine-3'-phosphorothioate
  modified_base 2: mod_base = OTHER; note = 2'-O-methylguanosine-3'-phosphorothioate
  modified_base 3: mod_base = OTHER; note = 2'-O-methylcytidine-3'-phosphate
  modified_base 4: mod_base = OTHER; note = 2'-O-methyluridine-3'-phosphate
  modified_base 5: mod_base = OTHER; note = 2'-O-methyluridine-3'-phosphate
  modified_base 6: mod_base = OTHER; note = 2'-O-hexadecyl-cytidine-3'-phosphate
  modified_base 7: mod_base = OTHER; note = 2'-deoxy-2'-fluoroadenosine-3'-phosphate
  modified_base 8: mod_base = OTHER; note = 2'-O-methyladenosine-3'-phosphate
  modified_base 9: mod_base = OTHER; note = 2'-deoxy-2'-fluorocytidine-3'-phosphate
  modified_base 10: mod_base = OTHER; note = 2'-deoxy-2'-fluorouridine-3'-phosphate
  modified_base 11: mod_base = OTHER; note = 2'-deoxy-2'-fluoroadenosine-3'-phosphate
  modified_base 12: mod_base = OTHER; note = 2'-O-methylcytidine-3'-phosphate
  modified_base 13: mod_base = OTHER; note = 2'-O-methyladenosine-3'-phosphate
  modified_base 14: mod_base = OTHER; note = 2'-O-methyladenosine-3'-phosphate
  modified_base 15: mod_base = OTHER; note = 2'-O-methylcytidine-3'-phosphate
  modified_base 16: mod_base = OTHER; note = 2'-O-methylguanosine-3'-phosphate
  modified_base 17: mod_base = OTHER; note = 2'-O-methyluridine-3'-phosphate
  modified_base 18: mod_base = OTHER; note = 2'-O-methylguanosine-3'-phosphate
  modified_base 19: mod_base = OTHER; note = 2'-O-methylcytidine-3'-phosphorothioate
  modified_base 20: mod_base = OTHER; note = 2'-O-methylguanosine-3'-phosphorothioate
  modified_base 21: mod_base = OTHER; note = 2'-O-methyladenosine
tgcttcaactacaacgtgcga

SEQ ID NO: 4000 - RNA, 21 nt, synthetic construct
  source 1..21: mol_type = other RNA
  modified_base 1: mod_base = OTHER; note = 2'-O-methyluridine-3'-phosphorothioate
  modified_base 2: mod_base = OTHER; note = 2'-O-methyluridine-3'-phosphorothioate
  modified_base 3: mod_base = OTHER; note = 2'-O-methylguanosine-3'-phosphate
  modified_base 4: mod_base = OTHER; note = 2'-O-methylcytidine-3'-phosphate
  modified_base 5: mod_base = OTHER; note = 2'-O-methyluridine-3'-phosphate
  modified_base 6: mod_base = OTHER; note = 2'-O-hexadecyl-guanosine-3'-phosphate
  modified_base 7: mod_base = OTHER; note = 2'-deoxy-2'-fluorouridine-3'-phosphate
  modified_base 8: mod_base = OTHER; note = 2'-O-methylguanosine-3'-phosphate
  modified_base 9: mod_base = OTHER; note = 2'-deoxy-2'-fluoroadenosine-3'-phosphate
  modified_base 10: mod_base = OTHER; note = 2'-deoxy-2'-fluorocytidine-3'-phosphate
  modified_base 11: mod_base = OTHER; note = 2'-deoxy-2'-fluoroguanosine-3'-phosphate
  modified_base 12: mod_base = OTHER; note = 2'-O-methyladenosine-3'-phosphate
  modified_base 13: mod_base = OTHER; note = 2'-O-methylcytidine-3'-phosphate
  modified_base 14: mod_base = OTHER; note = 2'-O-methyluridine-3'-phosphate
  modified_base 15: mod_base = OTHER; note = 2'-O-methyladenosine-3'-phosphate
  modified_base 16: mod_base = OTHER; note = 2'-O-methylcytidine-3'-phosphate
  modified_base 17: mod_base = OTHER; note = 2'-O-methyladenosine-3'-phosphate
  modified_base 18: mod_base = OTHER; note = 2'-O-methylguanosine-3'-phosphate
  modified_base 19: mod_base = OTHER; note = 2'-O-methylcytidine-3'-phosphorothioate
  modified_base 20: mod_base = OTHER; note = 2'-O-methylcytidine-3'-phosphorothioate
  modified_base 21: mod_base = OTHER; note = 2'-O-methyladenosine
ttgctgtgacgactacagcca

SEQ ID NO: 4001 - RNA, 21 nt, synthetic construct
  source 1..21: mol_type = other RNA
  modified_base 1: mod_base = OTHER; note = 2'-O-methylguanosine-3'-phosphorothioate
  modified_base 2: mod_base = OTHER; note = 2'-O-methyladenosine-3'-phosphorothioate
  modified_base 3: mod_base = OTHER; note = 2'-O-methylcytidine-3'-phosphate
  modified_base 4: mod_base = OTHER; note = 2'-O-methylguanosine-3'-phosphate
  modified_base 5: mod_base = OTHER; note = 2'-O-methyladenosine-3'-phosphate
  modified_base 6: mod_base = OTHER; note = 2'-O-hexadecyl-cytidine-3'-phosphate
  modified_base 7: mod_base = OTHER; note = 2'-deoxy-2'-fluorocytidine-3'-phosphate
  modified_base 8: mod_base = OTHER; note = 2'-O-methyluridine-3'-phosphate
  modified_base 9: mod_base = OTHER; note = 2'-deoxy-2'-fluoroguanosine-3'-phosphate
  modified_base 10: mod_base = OTHER; note = 2'-deoxy-2'-fluoroguanosine-3'-phosphate
  modified_base 11: mod_base = OTHER; note = 2'-deoxy-2'-fluoroadenosine-3'-phosphate
  modified_base 12: mod_base = OTHER; note = 2'-O-methyluridine-3'-phosphate
  modified_base 13: mod_base = OTHER; note = 2'-O-methylcytidine-3'-phosphate
  modified_base 14: mod_base = OTHER; note = 2'-O-methylcytidine-3'-phosphate
  modified_base 15: mod_base = OTHER; note = 2'-O-methyluridine-3'-phosphate
  modified_base 16: mod_base = OTHER; note = 2'-O-methylcytidine-3'-phosphate
  modified_base 17: mod_base = OTHER; note = 2'-O-methyladenosine-3'-phosphate
  modified_base 18: mod_base = OTHER; note = 2'-O-methylcytidine-3'-phosphate
  modified_base 19: mod_base = OTHER; note = 2'-O-methyladenosine-3'-phosphorothioate
  modified_base 20: mod_base = OTHER; note = 2'-O-methyladenosine-3'-phosphorothioate
  modified_base 21: mod_base = OTHER; note = 2'-O-methyladenosine
gacgacctggatcctcacaaa

SEQ ID NO: 4002 - RNA, 21 nt, synthetic construct
  source 1..21: mol_type = other RNA
  modified_base 1: mod_base = OTHER; note = 2'-O-methylcytidine-3'-phosphorothioate
  modified_base 2: mod_base = OTHER; note = 2'-O-methylguanosine-3'-phosphorothioate
  modified_base 3: mod_base = OTHER; note = 2'-O-methyladenosine-3'-phosphate
  modified_base 4: mod_base = OTHER; note = 2'-O-methylcytidine-3'-phosphate
  modified_base 5: mod_base = OTHER; note = 2'-O-methylcytidine-3'-phosphate
  modified_base 6: mod_base = OTHER; note = 2'-O-hexadecyl-adenosine-3'-phosphate
  modified_base 7: mod_base = OTHER; note = 2'-deoxy-2'-fluorocytidine-3'-phosphate
  modified_base 8: mod_base = OTHER; note = 2'-O-methyladenosine-3'-phosphate
  modified_base 9: mod_base = OTHER; note = 2'-deoxy-2'-fluoroadenosine-3'-phosphate
  modified_base 10: mod_base = OTHER; note = 2'-deoxy-2'-fluorocytidine-3'-phosphate
  modified_base 11: mod_base = OTHER; note = 2'-deoxy-2'-fluoroadenosine-3'-phosphate
  modified_base 12: mod_base = OTHER; note = 2'-O-methylguanosine-3'-phosphate
  modified_base 13: mod_base = OTHER; note = 2'-O-methylcytidine-3'-phosphate
  modified_base 14: mod_base = OTHER; note = 2'-O-methylcytidine-3'-phosphate
  modified_base 15: mod_base = OTHER; note = 2'-O-methyladenosine-3'-phosphate
  modified_base 16: mod_base = OTHER; note = 2'-O-methylcytidine-3'-phosphate
  modified_base 17: mod_base = OTHER; note = 2'-O-methyluridine-3'-phosphate
  modified_base 18: mod_base = OTHER; note = 2'-O-methyladenosine-3'-phosphate
  modified_base 19: mod_base = OTHER; note = 2'-O-methylcytidine-3'-phosphorothioate
  modified_base 20: mod_base = OTHER; note = 2'-O-methylguanosine-3'-phosphorothioate
  modified_base 21: mod_base = OTHER; note = 2'-O-methyladenosine
cgaccacaacagccactacga

SEQ ID NO: 4003 - RNA, 21 nt, synthetic construct
  source 1..21: mol_type = other RNA
  modified_base 1: mod_base = OTHER; note = 2'-O-methyluridine-3'-phosphorothioate
  modified_base 2: mod_base = OTHER; note = 2'-O-methylcytidine-3'-phosphorothioate
  modified_base 3: mod_base = OTHER; note = 2'-O-methylcytidine-3'-phosphate
  modified_base 4: mod_base = OTHER; note = 2'-O-methyladenosine-3'-phosphate
  modified_base 5: mod_base = OTHER; note = 2'-O-methylcytidine-3'-phosphate
  modified_base 6: mod_base = OTHER; note = 2'-O-hexadecyl-cytidine-3'-phosphate
  modified_base 7: mod_base = OTHER; note = 2'-deoxy-2'-fluorocytidine-3'-phosphate
  modified_base 8: mod_base = OTHER; note = 2'-O-methyluridine-3'-phosphate
  modified_base 9: mod_base = OTHER; note = 2'-deoxy-2'-fluoroguanosine-3'-phosphate
  modified_base 10: mod_base = OTHER; note = 2'-deoxy-2'-fluoroadenosine-3'-phosphate
  modified_base 11: mod_base = OTHER; note = 2'-deoxy-2'-fluoroguanosine-3'-phosphate
  modified_base 12: mod_base = OTHER; note = 2'-O-methyladenosine-3'-phosphate
  modified_base 13: mod_base = OTHER; note = 2'-O-methyladenosine-3'-phosphate
  modified_base 14: mod_base = OTHER; note = 2'-O-methylcytidine-3'-phosphate
  modified_base 15: mod_base = OTHER; note = 2'-O-methyladenosine-3'-phosphate
  modified_base 16: mod_base = OTHER; note = 2'-O-methylguanosine-3'-phosphate
  modified_base 17: mod_base = OTHER; note = 2'-O-methylcytidine-3'-phosphate
  modified_base 18: mod_base = OTHER; note = 2'-O-methyluridine-3'-phosphate
  modified_base 19: mod_base = OTHER; note = 2'-O-methylcytidine-3'-phosphorothioate
  modified_base 20: mod_base = OTHER; note = 2'-O-methylcytidine-3'-phosphorothioate
  modified_base 21: mod_base = OTHER; note = 2'-O-methyladenosine
tccaccctgagaacagctcca

SEQ ID NO: 4004 - RNA, 21 nt, synthetic construct
  source 1..21: mol_type = other RNA
  modified_base 1: mod_base = OTHER; note = 2'-O-methyluridine-3'-phosphorothioate
  modified_base 2: mod_base = OTHER; note = 2'-O-methylcytidine-3'-phosphorothioate
  modified_base 3: mod_base = OTHER; note = 2'-O-methylcytidine-3'-phosphate
  modified_base 4: mod_base = OTHER; note = 2'-O-methylcytidine-3'-phosphate
  modified_base 5: mod_base = OTHER; note = 2'-O-methyladenosine-3'-phosphate
  modified_base 6: mod_base = OTHER; note = 2'-O-hexadecyl-adenosine-3'-phosphate
  modified_base 7: mod_base = OTHER; note = 2'-deoxy-2'-fluoroadenosine-3'-phosphate
  modified_base 8: mod_base = OTHER; note = 2'-O-methylguanosine-3'-phosphate
  modified_base 9: mod_base = OTHER; note = 2'-deoxy-2'-fluorouridine-3'-phosphate
  modified_base 10: mod_base = OTHER; note = 2'-deoxy-2'-fluoroguanosine-3'-phosphate
  modified_base 11: mod_base = OTHER; note = 2'-deoxy-2'-fluorocytidine-3'-phosphate
  modified_base 12: mod_base = OTHER; note = 2'-O-methyluridine-3'-phosphate
  modified_base 13: mod_base = OTHER; note = 2'-O-methylguanosine-3'-phosphate
  modified_base 14: mod_base = OTHER; note = 2'-O-methyladenosine-3'-phosphate
  modified_base 15: mod_base = OTHER; note = 2'-O-methylcytidine-3'-phosphate
  modified_base 16: mod_base = OTHER; note = 2'-O-methylcytidine-3'-phosphate
  modified_base 17: mod_base = OTHER; note = 2'-O-methyladenosine-3'-phosphate
  modified_base 18: mod_base = OTHER; note = 2'-O-methylcytidine-3'-phosphate
  modified_base 19: mod_base = OTHER; note = 2'-O-methylcytidine-3'-phosphorothioate
  modified_base 20: mod_base = OTHER; note = 2'-O-methyladenosine-3'-phosphorothioate
  modified_base 21: mod_base = OTHER; note = 2'-O-methyladenosine
tcccaaagtgctgaccaccaa

SEQ ID NO: 4005 - RNA, 21 nt, synthetic construct
  source 1..21: mol_type = other RNA
  modified_base 1: mod_base = OTHER; note = 2'-O-methylcytidine-3'-phosphorothioate
  modified_base 2: mod_base = OTHER; note = 2'-O-methyladenosine-3'-phosphorothioate
  modified_base 3: mod_base = OTHER; note = 2'-O-methylguanosine-3'-phosphate
  modified_base 4: mod_base = OTHER; note = 2'-O-methylcytidine-3'-phosphate
  modified_base 5: mod_base = OTHER; note = 2'-O-methyluridine-3'-phosphate
  modified_base 6: mod_base = OTHER; note = 2'-O-hexadecyl-cytidine-3'-phosphate
  modified_base 7: mod_base = OTHER; note = 2'-deoxy-2'-fluorocytidine-3'-phosphate
  modified_base 8: mod_base = OTHER; note = 2'-O-methyladenosine-3'-phosphate
  modified_base 9: mod_base = OTHER; note = 2'-deoxy-2'-fluoroadenosine-3'-phosphate
  modified_base 10: mod_base = OTHER; note = 2'-deoxy-2'-fluoroadenosine-3'-phosphate
  modified_base 11: mod_base = OTHER; note = 2'-deoxy-2'-fluoroguanosine-3'-phosphate
  modified_base 12: mod_base = OTHER; note = 2'-O-methylcytidine-3'-phosphate
  modified_base 13: mod_base = OTHER; note = 2'-O-methylcytidine-3'-phosphate
  modified_base 14: mod_base = OTHER; note = 2'-O-methyladenosine-3'-phosphate
  modified_base 15: mod_base = OTHER; note = 2'-O-methylcytidine-3'-phosphate
  modified_base 16: mod_base = OTHER; note = 2'-O-methyluridine-3'-phosphate
  modified_base 17: mod_base = OTHER; note = 2'-O-methylcytidine-3'-phosphate
  modified_base 18: mod_base = OTHER; note = 2'-O-methylcytidine-3'-phosphate
  modified_base 19: mod_base = OTHER; note = 2'-O-methylcytidine-3'-phosphorothioate
  modified_base 20: mod_base = OTHER; note = 2'-O-methyluridine-3'-phosphorothioate
  modified_base 21: mod_base = OTHER; note = 2'-O-methyladenosine
cagctccaaagccactcccta

SEQ ID NO: 4006 - RNA, 21 nt, synthetic construct
  source 1..21: mol_type = other RNA
  modified_base 1: mod_base = OTHER; note = 2'-O-methylcytidine-3'-phosphorothioate
  modified_base 2: mod_base = OTHER; note = 2'-O-methylcytidine-3'-phosphorothioate
  modified_base 3: mod_base = OTHER; note = 2'-O-methyladenosine-3'-phosphate
  modified_base 4: mod_base = OTHER; note = 2'-O-methylguanosine-3'-phosphate
  modified_base 5: mod_base = OTHER; note = 2'-O-methyluridine-3'-phosphate
  modified_base 6: mod_base = OTHER; note = 2'-O-hexadecyl-cytidine-3'-phosphate
  modified_base 7: mod_base = OTHER; note = 2'-deoxy-2'-fluorocytidine-3'-phosphate
  modified_base 8: mod_base = OTHER; note = 2'-O-methyladenosine-3'-phosphate
  modified_base 9: mod_base = OTHER; note = 2'-deoxy-2'-fluoroguanosine-3'-phosphate
  modified_base 10: mod_base = OTHER; note = 2'-deoxy-2'-fluoroguanosine-3'-phosphate
  modified_base 11: mod_base = OTHER; note = 2'-deoxy-2'-fluoroguanosine-3'-phosphate
  modified_base 12: mod_base = OTHER; note = 2'-O-methyladenosine-3'-phosphate
  modified_base 13: mod_base = OTHER; note = 2'-O-methylcytidine-3'-phosphate
  modified_base 14: mod_base = OTHER; note = 2'-O-methyluridine-3'-phosphate
  modified_base 15: mod_base = OTHER; note = 2'-O-methylguanosine-3'-phosphate
  modified_base 16: mod_base = OTHER; note = 2'-O-methylcytidine-3'-phosphate
  modified_base 17: mod_base = OTHER; note = 2'-O-methyladenosine-3'-phosphate
  modified_base 18: mod_base = OTHER; note = 2'-O-methyladenosine-3'-phosphate
  modified_base 19: mod_base = OTHER; note = 2'-O-methylcytidine-3'-phosphorothioate
  modified_base 20: mod_base = OTHER; note = 2'-O-methylcytidine-3'-phosphorothioate
  modified_base 21: mod_base = OTHER; note = 2'-O-methyladenosine
ccagtccagggactgcaacca

SEQ ID NO: 4007 - RNA, 21 nt, synthetic construct
  source 1..21: mol_type = other RNA
  modified_base 1: mod_base = OTHER; note = 2'-O-methyladenosine-3'-phosphorothioate
  modified_base 2: mod_base = OTHER; note = 2'-O-methylguanosine-3'-phosphorothioate
  modified_base 3: mod_base = OTHER; note = 2'-O-methylcytidine-3'-phosphate
  modified_base 4: mod_base = OTHER; note = 2'-O-methyladenosine-3'-phosphate
  modified_base 5: mod_base = OTHER; note = 2'-O-methylcytidine-3'-phosphate
  modified_base 6: mod_base = OTHER; note = 2'-O-hexadecyl-uridine-3'-phosphate
  modified_base 7: mod_base = OTHER; note = 2'-deoxy-2'-fluoroguanosine-3'-phosphate
  modified_base 8: mod_base = OTHER; note = 2'-O-methyladenosine-3'-phosphate
  modified_base 9: mod_base = OTHER; note = 2'-deoxy-2'-fluoroguanosine-3'-phosphate
  modified_base 10: mod_base = OTHER; note = 2'-deoxy-2'-fluoroadenosine-3'-phosphate
  modified_base 11: mod_base = OTHER; note = 2'-deoxy-2'-fluoroadenosine-3'-phosphate
  modified_base 12: mod_base = OTHER; note = 2'-O-methylguanosine-3'-phosphate
  modified_base 13: mod_base = OTHER; note = 2'-O-methylcytidine-3'-phosphate
  modified_base 14: mod_base = OTHER; note = 2'-O-methyladenosine-3'-phosphate
  modified_base 15: mod_base = OTHER; note = 2'-O-methylcytidine-3'-phosphate
  modified_base 16: mod_base = OTHER; note = 2'-O-methyladenosine-3'-phosphate
  modified_base 17: mod_base = OTHER; note = 2'-O-methylguanosine-3'-phosphate
  modified_base 18: mod_base = OTHER; note = 2'-O-methylcytidine-3'-phosphate
  modified_base 19: mod_base = OTHER; note = 2'-O-methylcytidine-3'-phosphorothioate
  modified_base 20: mod_base = OTHER; note = 2'-O-methyladenosine-3'-phosphorothioate
  modified_base 21: mod_base = OTHER; note = 2'-O-methyladenosine
agcactgagaagcacagccaa

SEQ ID NO: 4008 - RNA, 21 nt, synthetic construct
  source 1..21: mol_type = other RNA
  modified_base 1: mod_base = OTHER; note = 2'-O-methylcytidine-3'-phosphorothioate
  modified_base 2: mod_base = OTHER; note = 2'-O-methyluridine-3'-phosphorothioate
  modified_base 3: mod_base = OTHER; note = 2'-O-methyladenosine-3'-phosphate
  modified_base 4: mod_base = OTHER; note = 2'-O-methylcytidine-3'-phosphate
  modified_base 5: mod_base = OTHER; note = 2'-O-methylcytidine-3'-phosphate
  modified_base 6: mod_base = OTHER; note = 2'-O-hexadecyl-adenosine-3'-phosphate
  modified_base 7: mod_base = OTHER; note = 2'-deoxy-2'-fluoroguanosine-3'-phosphate
  modified_base 8: mod_base = OTHER; note = 2'-O-methylcytidine-3'-phosphate
  modified_base 9: mod_base = OTHER; note = 2'-deoxy-2'-fluoroguanosine-3'-phosphate
  modified_base 10: mod_base = OTHER; note = 2'-deoxy-2'-fluorouridine-3'-phosphate
  modified_base 11: mod_base = OTHER; note = 2'-deoxy-2'-fluorouridine-3'-phosphate
  modified_base 12: mod_base = OTHER; note = 2'-O-methyladenosine-3'-phosphate
  modified_base 13: mod_base = OTHER; note = 2'-O-methylcytidine-3'-phosphate
  modified_base 14: mod_base = OTHER; note = 2'-O-methyladenosine-3'-phosphate
  modified_base 15: mod_base = OTHER; note = 2'-O-methylcytidine-3'-phosphate
  modified_base 16: mod_base = OTHER; note = 2'-O-methylcytidine-3'-phosphate
  modified_base 17: mod_base = OTHER; note = 2'-O-methylcytidine-3'-phosphate
  modified_base 18: mod_base = OTHER; note = 2'-O-methyladenosine-3'-phosphate
  modified_base 19: mod_base = OTHER; note = 2'-O-methyluridine-3'-phosphorothioate
  modified_base 20: mod_base = OTHER; note = 2'-O-methylcytidine-3'-phosphorothioate
  modified_base 21: mod_base = OTHER; note = 2'-O-methyladenosine
ctaccagcgttacacccatca

SEQ ID NO: 4009 - RNA, 21 nt, synthetic construct
  source 1..21: mol_type = other RNA
  modified_base 1: mod_base = OTHER; note = 2'-O-methyluridine-3'-phosphorothioate
  modified_base 2: mod_base = OTHER; note = 2'-O-methyluridine-3'-phosphorothioate
  modified_base 3: mod_base = OTHER; note = 2'-O-methylcytidine-3'-phosphate
  modified_base 4: mod_base = OTHER; note = 2'-O-methylcytidine-3'-phosphate
  modified_base 5: mod_base = OTHER; note = 2'-O-methyluridine-3'-phosphate
  modified_base 6: mod_base = OTHER; note = 2'-O-hexadecyl-cytidine-3'-phosphate
  modified_base 7: mod_base = OTHER; note = 2'-deoxy-2'-fluorocytidine-3'-phosphate
  modified_base 8: mod_base = OTHER; note = 2'-O-methylcytidine-3'-phosphate
  modified_base 9: mod_base = OTHER; note = 2'-deoxy-2'-fluorouridine-3'-phosphate
  modified_base 10: mod_base = OTHER; note = 2'-deoxy-2'-fluoroguanosine-3'-phosphate
  modified_base 11: mod_base = OTHER; note = 2'-deoxy-2'-fluoroguanosine-3'-phosphate
  modified_base 12: mod_base = OTHER; note = 2'-O-methylguanosine-3'-phosphate
  modified_base 13: mod_base = OTHER; note = 2'-O-methylcytidine-3'-phosphate
  modified_base 14: mod_base = OTHER; note = 2'-O-methyladenosine-3'-phosphate
  modified_base 15: mod_base = OTHER; note = 2'-O-methylcytidine-3'-phosphate
  modified_base 16: mod_base = OTHER; note = 2'-O-methylcytidine-3'-phosphate
  modified_base 17: mod_base = OTHER; note = 2'-O-methyladenosine-3'-phosphate
  modified_base 18: mod_base = OTHER; note = 2'-O-methylcytidine-3'-phosphate
  modified_base 19: mod_base = OTHER; note = 2'-O-methylcytidine-3'-phosphorothioate
  modified_base 20: mod_base = OTHER; note = 2'-O-methyluridine-3'-phosphorothioate
  modified_base 21: mod_base = OTHER; note = 2'-O-methyladenosine
ttcctccctgggcaccaccta

SEQ ID NO: 4010 - RNA, 21 nt, synthetic construct
  source 1..21: mol_type = other RNA
  modified_base 1: mod_base = OTHER; note = 2'-O-methylcytidine-3'-phosphorothioate
  modified_base 2: mod_base = OTHER; note = 2'-O-methylcytidine-3'-phosphorothioate
  modified_base 3: mod_base = OTHER; note = 2'-O-methyluridine-3'-phosphate
  modified_base 4: mod_base = OTHER; note = 2'-O-methyladenosine-3'-phosphate
  modified_base 5: mod_base = OTHER; note = 2'-O-methyluridine-3'-phosphate
  modified_base 6: mod_base = OTHER; note = 2'-O-hexadecyl-cytidine-3'-phosphate
  modified_base 7: mod_base = OTHER; note = 2'-deoxy-2'-fluoroadenosine-3'-phosphate
  modified_base 8: mod_base = OTHER; note = 2'-O-methylcytidine-3'-phosphate
  modified_base 9: mod_base = OTHER; note = 2'-deoxy-2'-fluoroadenosine-3'-phosphate
  modified_base 10: mod_base = OTHER; note = 2'-deoxy-2'-fluoroguanosine-3'-phosphate
  modified_base 11: mod_base = OTHER; note = 2'-deoxy-2'-fluoroadenosine-3'-phosphate
  modified_base 12: mod_base = OTHER; note = 2'-O-methylcytidine-3'-phosphate
  modified_base 13: mod_base = OTHER; note = 2'-O-methylcytidine-3'-phosphate
  modified_base 14: mod_base = OTHER; note = 2'-O-methyladenosine-3'-phosphate
  modified_base 15: mod_base = OTHER; note = 2'-O-methylcytidine-3'-phosphate
  modified_base 16: mod_base = OTHER; note = 2'-O-methylcytidine-3'-phosphate
  modified_base 17: mod_base = OTHER; note = 2'-O-methyladenosine-3'-phosphate
  modified_base 18: mod_base = OTHER; note = 2'-O-methylcytidine-3'-phosphate
  modified_base 19: mod_base = OTHER; note = 2'-O-methyladenosine-3'-phosphorothioate
  modified_base 20: mod_base = OTHER; note = 2'-O-methylcytidine-3'-phosphorothioate
  modified_base 21: mod_base = OTHER; note = 2'-O-methyladenosine
cctatcacagaccaccacaca

SEQ ID NO: 4011 - RNA, 21 nt, synthetic construct
  source 1..21: mol_type = other RNA
  modified_base 1: mod_base = OTHER; note = 2'-O-methylcytidine-3'-phosphorothioate
  modified_base 2: mod_base = OTHER; note = 2'-O-methylcytidine-3'-phosphorothioate
  modified_base 3: mod_base = OTHER; note = 2'-O-methyladenosine-3'-phosphate
  modified_base 4: mod_base = OTHER; note = 2'-O-methylcytidine-3'-phosphate
  modified_base 5: mod_base = OTHER; note = 2'-O-methylcytidine-3'-phosphate
  modified_base 6: mod_base = OTHER; note = 2'-O-hexadecyl-adenosine-3'-phosphate
  modified_base 7: mod_base = OTHER; note = 2'-deoxy-2'-fluorouridine-3'-phosphate
  modified_base 8: mod_base = OTHER; note = 2'-O-methylguanosine-3'-phosphate
  modified_base 9: mod_base = OTHER; note = 2'-deoxy-2'-fluorouridine-3'-phosphate
  modified_base 10: mod_base = OTHER; note = 2'-deoxy-2'-fluorocytidine-3'-phosphate
  modified_base 11: mod_base = OTHER; note = 2'-deoxy-2'-fluorocytidine-3'-phosphate
  modified_base 12: mod_base = OTHER; note = 2'-O-methyladenosine-3'-phosphate
  modified_base 13: mod_base = OTHER; note = 2'-O-methylcytidine-3'-phosphate
  modified_base 14: mod_base = OTHER; note = 2'-O-methyladenosine-3'-phosphate
  modified_base 15: mod_base = OTHER; note = 2'-O-methylguanosine-3'-phosphate
  modified_base 16: mod_base = OTHER; note = 2'-O-methylcytidine-3'-phosphate
  modified_base 17: mod_base = OTHER; note = 2'-O-methylcytidine-3'-phosphate
  modified_base 18: mod_base = OTHER; note = 2'-O-methyladenosine-3'-phosphate
  modified_base 19: mod_base = OTHER; note = 2'-O-methylcytidine-3'-phosphorothioate
  modified_base 20: mod_base = OTHER; note = 2'-O-methyladenosine-3'-phosphorothioate
  modified_base 21: mod_base = OTHER; note = 2'-O-methyladenosine
ccaccatgtccacagccacaa

SEQ ID NO: 4012 - RNA, 21 nt, synthetic construct
  source 1..21: mol_type = other RNA
  modified_base 1: mod_base = OTHER; note = 2'-O-methyluridine-3'-phosphorothioate
  modified_base 2: mod_base = OTHER; note = 2'-O-methylcytidine-3'-phosphorothioate
  modified_base 3: mod_base = OTHER; note = 2'-O-methylcytidine-3'-phosphate
  modified_base 4: mod_base = OTHER; note = 2'-O-methyluridine-3'-phosphate
  modified_base 5: mod_base = OTHER; note = 2'-O-methylcytidine-3'-phosphate
  modified_base 6: mod_base = OTHER; note = 2'-O-hexadecyl-cytidine-3'-phosphate
  modified_base 7: mod_base = OTHER; note = 2'-deoxy-2'-fluoroadenosine-3'-phosphate
  modified_base 8: mod_base = OTHER; note = 2'-O-methylcytidine-3'-phosphate
  modified_base 9: mod_base = OTHER; note = 2'-deoxy-2'-fluorouridine-3'-phosphate
  modified_base 10: mod_base = OTHER; note = 2'-deoxy-2'-fluorocytidine-3'-phosphate
  modified_base 11: mod_base = OTHER; note = 2'-deoxy-2'-fluorocytidine-3'-phosphate
  modified_base 12: mod_base = OTHER; note = 2'-O-methyladenosine-3'-phosphate
  modified_base 13: mod_base = OTHER; note = 2'-O-methylguanosine-3'-phosphate
  modified_base 14: mod_base = OTHER; note = 2'-O-methyladenosine-3'-phosphate
  modified_base 15: mod_base = OTHER; note = 2'-O-methylguanosine-3'-phosphate
  modified_base 16: mod_base = OTHER; note = 2'-O-methyladenosine-3'-phosphate
  modified_base 17: mod_base = OTHER; note = 2'-O-methylcytidine-3'-phosphate
  modified_base 18: mod_base = OTHER; note = 2'-O-methyluridine-3'-phosphate
  modified_base 19: mod_base = OTHER; note = 2'-O-methylguanosine-3'-phosphorothioate
  modified_base 20: mod_base = OTHER; note = 2'-O-methylcytidine-3'-phosphorothioate
  modified_base 21: mod_base = OTHER; note = 2'-O-methyladenosine
tcctccactccagagactgca

SEQ ID NO: 4013 - RNA, 21 nt, synthetic construct
  source 1..21: mol_type = other RNA
  modified_base 1: mod_base = OTHER; note = 2'-O-methylcytidine-3'-phosphorothioate
  modified_base 2: mod_base = OTHER; note = 2'-O-methyluridine-3'-phosphorothioate
  modified_base 3: mod_base = OTHER; note = 2'-O-methylcytidine-3'-phosphate
  modified_base 4: mod_base = OTHER; note = 2'-O-methylcytidine-3'-phosphate
  modified_base 5: mod_base = OTHER; note = 2'-O-methyladenosine-3'-phosphate
  modified_base 6: mod_base = OTHER; note = 2'-O-hexadecyl-cytidine-3'-phosphate
  modified_base 7: mod_base = OTHER; note = 2'-deoxy-2'-fluoroadenosine-3'-phosphate
  modified_base 8: mod_base = OTHER; note = 2'-O-methylguanosine-3'-phosphate
  modified_base 9: mod_base = OTHER; note = 2'-deoxy-2'-fluorouridine-3'-phosphate
  modified_base 10: mod_base = OTHER; note = 2'-deoxy-2'-fluoroguanosine-3'-phosphate
  modified_base 11: mod_base = OTHER; note = 2'-deoxy-2'-fluorocytidine-3'-phosphate
  modified_base 12: mod_base = OTHER; note = 2'-O-methyluridine-3'-phosphate
  modified_base 13: mod_base = OTHER; note = 2'-O-methyluridine-3'-phosphate
  modified_base 14: mod_base = OTHER; note = 2'-O-methyladenosine-3'-phosphate
  modified_base 15: mod_base = OTHER; note = 2'-O-methylcytidine-3'-phosphate
  modified_base 16: mod_base = OTHER; note = 2'-O-methylcytidine-3'-phosphate
  modified_base 17: mod_base = OTHER; note = 2'-O-methylguanosine-3'-phosphate
  modified_base 18: mod_base = OTHER; note = 2'-O-methylcytidine-3'-phosphate
  modified_base 19: mod_base = OTHER; note = 2'-O-methylcytidine-3'-phosphorothioate
  modified_base 20: mod_base = OTHER; note = 2'-O-methyladenosine-3'-phosphorothioate
  modified_base 21: mod_base = OTHER; note = 2'-O-methyladenosine
ctccacagtgcttaccgccaa

SEQ ID NO: 4014 - RNA, 21 nt, synthetic construct
  source 1..21: mol_type = other RNA
  modified_base 1: mod_base = OTHER; note = 2'-O-methylcytidine-3'-phosphorothioate
  modified_base 2: mod_base = OTHER; note = 2'-O-methyladenosine-3'-phosphorothioate
  modified_base 3: mod_base = OTHER; note = 2'-O-methylguanosine-3'-phosphate
  modified_base 4: mod_base = OTHER; note = 2'-O-methylguanosine-3'-phosphate
  modified_base 5: mod_base = OTHER; note = 2'-O-methyladenosine-3'-phosphate
  modified_base 6: mod_base = OTHER; note = 2'-O-hexadecyl-adenosine-3'-phosphate
  modified_base 7: mod_base = OTHER; note = 2'-deoxy-2'-fluorocytidine-3'-phosphate
  modified_base 8: mod_base = OTHER; note = 2'-O-methyladenosine-3'-phosphate
  modified_base 9: mod_base = OTHER; note = 2'-deoxy-2'-fluoroguanosine-3'-phosphate
  modified_base 10: mod_base = OTHER; note = 2'-deoxy-2'-fluorocytidine-3'-phosphate
  modified_base 11: mod_base = OTHER; note = 2'-deoxy-2'-fluorouridine-3'-phosphate
  modified_base 12: mod_base = OTHER; note = 2'-O-methylcytidine-3'-phosphate
  modified_base 13: mod_base = OTHER; note = 2'-O-methyladenosine-3'-phosphate
  modified_base 14: mod_base = OTHER; note = 2'-O-methylcytidine-3'-phosphate
  modified_base 15: mod_base = OTHER; note = 2'-O-methyladenosine-3'-phosphate
  modified_base 16: mod_base = OTHER; note = 2'-O-methylcytidine-3'-phosphate
  modified_base 17: mod_base = OTHER; note = 2'-O-methyluridine-3'-phosphate
  modified_base 18: mod_base = OTHER; note = 2'-O-methyladenosine-3'-phosphate
  modified_base 19: mod_base = OTHER; note = 2'-O-methylcytidine-3'-phosphorothioate
  modified_base 20: mod_base = OTHER; note = 2'-O-methylcytidine-3'-phosphorothioate
  modified_base 21: mod_base = OTHER; note = 2'-O-methyladenosine
caggaacagctcacactacca

SEQ ID NO: 4015 - RNA, 21 nt, synthetic construct
  source 1..21: mol_type = other RNA
  modified_base 1: mod_base = OTHER; note = 2'-O-methyluridine-3'-phosphorothioate
  modified_base 2: mod_base = OTHER; note = 2'-O-methylguanosine-3'-phosphorothioate
  modified_base 3: mod_base = OTHER; note = 2'-O-methylcytidine-3'-phosphate
  modified_base 4: mod_base = OTHER; note = 2'-O-methylcytidine-3'-phosphate
  modified_base 5: mod_base = OTHER; note = 2'-O-methyladenosine-3'-phosphate
  modified_base 6: mod_base = OTHER; note = 2'-O-hexadecyl-adenosine-3'-phosphate
  modified_base 7: mod_base = OTHER; note = 2'-deoxy-2'-fluorocytidine-3'-phosphate
  modified_base 8: mod_base = OTHER; note = 2'-O-methyluridine-3'-phosphate
  modified_base 9: mod_base = OTHER; note = 2'-deoxy-2'-fluoroadenosine-3'-phosphate
  modified_base 10: mod_base = OTHER; note = 2'-deoxy-2'-fluorocytidine-3'-phosphate
  modified_base 11: mod_base = OTHER; note = 2'-deoxy-2'-fluorocytidine-3'-phosphate
  modified_base 12: mod_base = OTHER; note = 2'-O-methyladenosine-3'-phosphate
  modified_base 13: mod_base = OTHER; note = 2'-O-methylcytidine-3'-phosphate
  modified_base 14: mod_base = OTHER; note = 2'-O-methyladenosine-3'-phosphate
  modified_base 15: mod_base = OTHER; note = 2'-O-methyladenosine-3'-phosphate
  modified_base 16: mod_base = OTHER; note = 2'-O-methylcytidine-3'-phosphate
  modified_base 17: mod_base = OTHER; note = 2'-O-methylcytidine-3'-phosphate
  modified_base 18: mod_base = OTHER; note = 2'-O-methyladenosine-3'-phosphate
  modified_base 19: mod_base = OTHER; note = 2'-O-methylcytidine-3'-phosphorothioate
  modified_base 20: mod_base = OTHER; note = 2'-O-methylguanosine-3'-phosphorothioate
  modified_base 21: mod_base = OTHER; note = 2'-O-methyladenosine
tgccaactaccacaaccacga

SEQ ID NO: 4016 - RNA, 21 nt, synthetic construct
  source 1..21: mol_type = other RNA
  modified_base 1: mod_base = OTHER; note = 2'-O-methyluridine-3'-phosphorothioate
  modified_base 2: mod_base = OTHER; note = 2'-O-methylcytidine-3'-phosphorothioate
  modified_base 3: mod_base = OTHER; note = 2'-O-methylcytidine-3'-phosphate
  modified_base 4: mod_base = OTHER; note = 2'-O-methyladenosine-3'-phosphate
  modified_base 5: mod_base = OTHER; note = 2'-O-methylguanosine-3'-phosphate
  modified_base 6: mod_base = OTHER; note = 2'-O-hexadecyl-uridine-3'-phosphate
  modified_base 7: mod_base = OTHER; note = 2'-deoxy-2'-fluoroguanosine-3'-phosphate
  modified_base 8: mod_base = OTHER; note = 2'-O-methyluridine-3'-phosphate
  modified_base 9: mod_base = OTHER; note = 2'-deoxy-2'-fluoroguanosine-3'-phosphate
  modified_base 10: mod_base = OTHER; note = 2'-deoxy-2'-fluoroguanosine-3'-phosphate
  modified_base 11: mod_base = OTHER; note = 2'-deoxy-2'-fluoroadenosine-3'-phosphate
  modified_base 12: mod_base = OTHER; note = 2'-O-methyluridine-3'-phosphate
  modified_base 13: mod_base = OTHER; note = 2'-O-methylcytidine-3'-phosphate
  modified_base 14: mod_base = OTHER; note = 2'-O-methyladenosine-3'-phosphate
  modified_base 15: mod_base = OTHER; note = 2'-O-methylguanosine-3'-phosphate
  modified_base 16: mod_base = OTHER; note = 2'-O-methylcytidine-3'-phosphate
  modified_base 17: mod_base = OTHER; note = 2'-O-methyladenosine-3'-phosphate
  modified_base 18: mod_base = OTHER; note = 2'-O-methylcytidine-3'-phosphate
  modified_base 19: mod_base = OTHER; note = 2'-O-methyladenosine-3'-phosphorothioate
  modified_base 20: mod_base = OTHER; note = 2'-O-methyladenosine-3'-phosphorothioate
  modified_base 21: mod_base = OTHER; note = 2'-O-methyladenosine
tccagtgtggatcagcacaaa

SEQ ID NO: 4017 - RNA, 21 nt, synthetic construct
  source 1..21: mol_type = other RNA
  modified_base 1: mod_base = OTHER; note = 2'-O-methyladenosine-3'-phosphorothioate
  modified_base 2: mod_base = OTHER; note = 2'-O-methylcytidine-3'-phosphorothioate
  modified_base 3: mod_base = OTHER; note = 2'-O-methylcytidine-3'-phosphate
  modified_base 4: mod_base = OTHER; note = 2'-O-methylcytidine-3'-phosphate
  modified_base 5: mod_base = OTHER; note = 2'-O-methyladenosine-3'-phosphate
  modified_base 6: mod_base = OTHER; note = 2'-O-hexadecyl-cytidine-3'-phosphate
  modified_base 7: mod_base = OTHER; note = 2'-deoxy-2'-fluoroadenosine-3'-phosphate
  modified_base 8: mod_base = OTHER; note = 2'-O-methyladenosine-3'-phosphate
  modified_base 9: mod_base = OTHER; note = 2'-deoxy-2'-fluorocytidine-3'-phosphate
  modified_base 10: mod_base = OTHER; note = 2'-deoxy-2'-fluorocytidine-3'-phosphate
  modified_base 11: mod_base = OTHER; note = 2'-deoxy-2'-fluoroadenosine-3'-phosphate
  modified_base 12: mod_base = OTHER; note = 2'-O-methylguanosine-3'-phosphate
  modified_base 13: mod_base = OTHER; note = 2'-O-methyladenosine-3'-phosphate
  modified_base 14: mod_base = OTHER; note = 2'-O-methylguanosine-3'-phosphate
  modified_base 15: mod_base = OTHER; note = 2'-O-methylguanosine-3'-phosphate
  modified_base 16: mod_base = OTHER; note = 2'-O-methylcytidine-3'-phosphate
  modified_base 17: mod_base = OTHER; note = 2'-O-methyluridine-3'-phosphate
  modified_base 18: mod_base = OTHER; note = 2'-O-methylcytidine-3'-phosphate
  modified_base 19: mod_base = OTHER; note = 2'-O-methylcytidine-3'-phosphorothioate
  modified_base 20: mod_base = OTHER; note = 2'-O-methyladenosine-3'-phosphorothioate
  modified_base 21: mod_base = OTHER; note = 2'-O-methyladenosine
acccacaaccagaggctccaa

SEQ ID NO: 4018 - RNA, 21 nt, synthetic construct
  source 1..21: mol_type = other RNA
  modified_base 1: mod_base = OTHER; note = 2'-O-methylcytidine-3'-phosphorothioate
  modified_base 2: mod_base = OTHER; note = 2'-O-methylguanosine-3'-phosphorothioate
  modified_base 3: mod_base = OTHER; note = 2'-O-methylcytidine-3'-phosphate
  modified_base 4: mod_base = OTHER; note = 2'-O-methylcytidine-3'-phosphate
  modified_base 5: mod_base = OTHER; note = 2'-O-methyladenosine-3'-phosphate
  modified_base 6: mod_base = OTHER; note = 2'-O-hexadecyl-cytidine-3'-phosphate
  modified_base 7: mod_base = OTHER; note = 2'-deoxy-2'-fluoroadenosine-3'-phosphate
  modified_base 8: mod_base = OTHER; note = 2'-O-methylguanosine-3'-phosphate
  modified_base 9: mod_base = OTHER; note = 2'-deoxy-2'-fluorouridine-3'-phosphate
  modified_base 10: mod_base = OTHER; note = 2'-deoxy-2'-fluoroguanosine-3'-phosphate
  modified_base 11: mod_base = OTHER; note = 2'-deoxy-2'-fluorocytidine-3'-phosphate
  modified_base 12: mod_base = OTHER; note = 2'-O-methyluridine-3'-phosphate
  modified_base 13: mod_base = OTHER; note = 2'-O-methylguanosine-3'-phosphate
  modified_base 14: mod_base = OTHER; note = 2'-O-methyladenosine-3'-phosphate
  modified_base 15: mod_base = OTHER; note = 2'-O-methylcytidine-3'-phosphate
  modified_base 16: mod_base = OTHER; note = 2'-O-methylcytidine-3'-phosphate
  modified_base 17: mod_base = OTHER; note = 2'-O-methyladenosine-3'-phosphate
  modified_base 18: mod_base = OTHER; note = 2'-O-methylcytidine-3'-phosphate
  modified_base 19: mod_base = OTHER; note = 2'-O-methylcytidine-3'-phosphorothioate
  modified_base 20: mod_base = OTHER; note = 2'-O-methyladenosine-3'-phosphorothioate
  modified_base 21: mod_base = OTHER; note = 2'-O-methyladenosine
cgccacagtgctgaccaccaa

SEQ ID NO: 4019 - RNA, 21 nt, synthetic construct
  source 1..21: mol_type = other RNA
  modified_base 1: mod_base = OTHER; note = 2'-O-methylguanosine-3'-phosphorothioate
  modified_base 2: mod_base = OTHER; note = 2'-O-methylcytidine-3'-phosphorothioate
  modified_base 3: mod_base = OTHER; note = 2'-O-methylcytidine-3'-phosphate
  modified_base 4: mod_base = OTHER; note = 2'-O-methyladenosine-3'-phosphate
  modified_base 5: mod_base = OTHER; note = 2'-O-methylcytidine-3'-phosphate
  modified_base 6: mod_base = OTHER; note = 2'-O-hexadecyl-uridine-3'-phosphate
  modified_base 7: mod_base = OTHER; note = 2'-deoxy-2'-fluoroguanosine-3'-phosphate
  modified_base 8: mod_base = OTHER; note = 2'-O-methylguanosine-3'-phosphate
  modified_base 9: mod_base = OTHER; note = 2'-deoxy-2'-fluorouridine-3'-phosphate
  modified_base 10: mod_base = OTHER; note = 2'-deoxy-2'-fluorouridine-3'-phosphate
  modified_base 11: mod_base = OTHER; note = 2'-deoxy-2'-fluorocytidine-3'-phosphate
  modified_base 12: mod_base = OTHER; note = 2'-O-methyluridine-3'-phosphate
  modified_base 13: mod_base = OTHER; note = 2'-O-methyladenosine-3'-phosphate
  modified_base 14: mod_base = OTHER; note = 2'-O-methyluridine-3'-phosphate
  modified_base 15: mod_base = OTHER; note = 2'-O-methylguanosine-3'-phosphate
  modified_base 16: mod_base = OTHER; note = 2'-O-methylguanosine-3'-phosphate
  modified_base 17: mod_base = OTHER; note = 2'-O-methylcytidine-3'-phosphate
  modified_base 18: mod_base = OTHER; note = 2'-O-methyladenosine-3'-phosphate
  modified_base 19: mod_base = OTHER; note = 2'-O-methyladenosine-3'-phosphorothioate
  modified_base 20: mod_base = OTHER; note = 2'-O-methylcytidine-3'-phosphorothioate
  modified_base 21: mod_base = OTHER; note = 2'-O-methyladenosine
gccactggttctatggcaaca

SEQ ID NO: 4020 - RNA, 21 nt, synthetic construct
  source 1..21: mol_type = other RNA
  modified_base 1: mod_base = OTHER; note = 2'-O-methylcytidine-3'-phosphorothioate
  modified_base 2: mod_base = OTHER; note = 2'-O-methyluridine-3'-phosphorothioate
  modified_base 3: mod_base = OTHER; note = 2'-O-methylcytidine-3'-phosphate
  modified_base 4: mod_base = OTHER; note = 2'-O-methylcytidine-3'-phosphate
  modified_base 5: mod_base = OTHER; note = 2'-O-methyluridine-3'-phosphate
  modified_base 6: mod_base = OTHER; note = 2'-O-hexadecyl-cytidine-3'-phosphate
  modified_base 7: mod_base = OTHER; note = 2'-deoxy-2'-fluorouridine-3'-phosphate
  modified_base 8: mod_base = OTHER; note = 2'-O-methyladenosine-3'-phosphate
  modified_base 9: mod_base = OTHER; note = 2'-deoxy-2'-fluoroguanosine-3'-phosphate
  modified_base 10: mod_base = OTHER; note = 2'-deoxy-2'-fluorocytidine-3'-phosphate
  modified_base 11: mod_base = OTHER; note = 2'-deoxy-2'-fluoroadenosine-3'-phosphate
  modified_base 12: mod_base = OTHER; note = 2'-O-methylcytidine-3'-phosphate
  modified_base 13: mod_base = OTHER; note = 2'-O-methyladenosine-3'-phosphate
  modified_base 14: mod_base = OTHER; note = 2'-O-methylcytidine-3'-phosphate
  modified_base 15: mod_base = OTHER; note = 2'-O-methyladenosine-3'-phosphate
  modified_base 16: mod_base = OTHER; note = 2'-O-methylguanosine-3'-phosphate
  modified_base 17: mod_base = OTHER; note = 2'-O-methyladenosine-3'-phosphate
  modified_base 18: mod_base = OTHER; note = 2'-O-methylcytidine-3'-phosphate
  modified_base 19: mod_base = OTHER; note = 2'-O-methylcytidine-3'-phosphorothioate
  modified_base 20: mod_base = OTHER; note = 2'-O-methyladenosine-3'-phosphorothioate
  modified_base 21: mod_base = OTHER; note = 2'-O-methyladenosine
ctcctctagcacacagaccaa

SEQ ID NO: 4021 - RNA, 21 nt, synthetic construct
  source 1..21: mol_type = other RNA
  modified_base 1: mod_base = OTHER; note = 2'-O-methylguanosine-3'-phosphorothioate
  modified_base 2: mod_base = OTHER; note = 2'-O-methylguanosine-3'-phosphorothioate
  modified_base 3: mod_base = OTHER; note = 2'-O-methylcytidine-3'-phosphate
  modified_base 4: mod_base = OTHER; note = 2'-O-methylcytidine-3'-phosphate
  modified_base 5: mod_base = OTHER; note = 2'-O-methyladenosine-3'-phosphate
  modified_base 6: mod_base = OTHER; note = 2'-O-hexadecyl-cytidine-3'-phosphate
  modified_base 7: mod_base = OTHER; note = 2'-deoxy-2'-fluorouridine-3'-phosphate
  modified_base 8: mod_base = OTHER; note = 2'-O-methyladenosine-3'-phosphate
  modified_base 9: mod_base = OTHER; note = 2'-deoxy-2'-fluorocytidine-3'-phosphate
  modified_base 10: mod_base = OTHER; note = 2'-deoxy-2'-fluoroguanosine-3'-phosphate
  modified_base 11: mod_base = OTHER; note = 2'-deoxy-2'-fluoroadenosine-3'-phosphate
  modified_base 12: mod_base = OTHER; note = 2'-O-methyluridine-3'-phosphate
  modified_base 13: mod_base = OTHER; note = 2'-O-methylcytidine-3'-phosphate
  modified_base 14: mod_base = OTHER; note = 2'-O-methyladenosine-3'-phosphate
  modified_base 15: mod_base = OTHER; note = 2'-O-methylcytidine-3'-phosphate
  modified_base 16: mod_base = OTHER; note = 2'-O-methylguanosine-3'-phosphate
  modified_base 17: mod_base = OTHER; note = 2'-O-methylguanosine-3'-phosphate
  modified_base 18: mod_base = OTHER; note = 2'-O-methylcytidine-3'-phosphate
  modified_base 19: mod_base = OTHER; note = 2'-O-methylcytidine-3'-phosphorothioate
  modified_base 20: mod_base = OTHER; note = 2'-O-methyladenosine-3'-phosphorothioate
  modified_base 21: mod_base = OTHER; note = 2'-O-methyladenosine
ggccactacgatcacggccaa

SEQ ID NO: 4022 - RNA, 21 nt, synthetic construct
  source 1..21: mol_type = other RNA
  modified_base 1: mod_base = OTHER; note = 2'-O-methylcytidine-3'-phosphorothioate
  modified_base 2: mod_base = OTHER; note = 2'-O-methyluridine-3'-phosphorothioate
  modified_base 3: mod_base = OTHER; note = 2'-O-methylcytidine-3'-phosphate
  modified_base 4: mod_base = OTHER; note = 2'-O-methylcytidine-3'-phosphate
  modified_base 5: mod_base = OTHER; note = 2'-O-methyluridine-3'-phosphate
  modified_base 6: mod_base = OTHER; note = 2'-O-hexadecyl-cytidine-3'-phosphate
  modified_base 7: mod_base = OTHER; note = 2'-deoxy-2'-fluoroadenosine-3'-phosphate
  modified_base 8: mod_base = OTHER; note = 2'-O-methyladenosine-3'-phosphate
  modified_base 9: mod_base = OTHER; note = 2'-deoxy-2'-fluorocytidine-3'-phosphate
  modified_base 10: mod_base = OTHER; note = 2'-deoxy-2'-fluorouridine-3'-phosphate
  modified_base 11: mod_base = OTHER; note = 2'-deoxy-2'-fluorocytidine-3'-phosphate
  modified_base 12: mod_base = OTHER; note = 2'-O-methylcytidine-3'-phosphate
  modified_base 13: mod_base = OTHER; note = 2'-O-methyluridine-3'-phosphate
  modified_base 14: mod_base = OTHER; note = 2'-O-methylguanosine-3'-phosphate
  modified_base 15: mod_base = OTHER; note = 2'-O-methylguanosine-3'-phosphate
  modified_base 16: mod_base = OTHER; note = 2'-O-methylguanosine-3'-phosphate
  modified_base 17: mod_base = OTHER; note = 2'-O-methyladenosine-3'-phosphate
  modified_base 18: mod_base = OTHER; note = 2'-O-methylcytidine-3'-phosphate
  modified_base 19: mod_base = OTHER; note = 2'-O-methyladenosine-3'-phosphorothioate
  modified_base 20: mod_base = OTHER; note = 2'-O-methyladenosine-3'-phosphorothioate
  modified_base 21: mod_base = OTHER; note = 2'-O-methyladenosine
ctcctcaactcctgggacaaa

SEQ ID NO: 4023 - RNA, 21 nt, synthetic construct
  source 1..21: mol_type = other RNA
  modified_base 1: mod_base = OTHER; note = 2'-O-methylcytidine-3'-phosphorothioate
  modified_base 2: mod_base = OTHER; note = 2'-O-methyladenosine-3'-phosphorothioate
  modified_base 3: mod_base = OTHER; note = 2'-O-methylguanosine-3'-phosphate
  modified_base 4: mod_base = OTHER; note = 2'-O-methylcytidine-3'-phosphate
  modified_base 5: mod_base = OTHER; note = 2'-O-methyladenosine-3'-phosphate
  modified_base 6: mod_base = OTHER; note = 2'-O-hexadecyl-adenosine-3'-phosphate
  modified_base 7: mod_base = OTHER; note = 2'-deoxy-2'-fluorocytidine-3'-phosphate
  modified_base 8: mod_base = OTHER; note = 2'-O-methyladenosine-3'-phosphate
  modified_base 9: mod_base = OTHER; note = 2'-deoxy-2'-fluorocytidine-3'-phosphate
  modified_base 10: mod_base = OTHER; note = 2'-deoxy-2'-fluoroadenosine-3'-phosphate
  modified_base 11: mod_base = OTHER; note = 2'-deoxy-2'-fluoroguanosine-3'-phosphate
  modified_base 12: mod_base = OTHER; note = 2'-O-methyluridine-3'-phosphate
  modified_base 13: mod_base = OTHER; note = 2'-O-methylguanosine-3'-phosphate
  modified_base 14: mod_base = OTHER; note = 2'-O-methyladenosine-3'-phosphate
  modified_base 15: mod_base = OTHER; note = 2'-O-methylcytidine-3'-phosphate
  modified_base 16: mod_base = OTHER; note = 2'-O-methyluridine-3'-phosphate
  modified_base 17: mod_base = OTHER; note = 2'-O-methylcytidine-3'-phosphate
  modified_base 18: mod_base = OTHER; note = 2'-O-methylcytidine-3'-phosphate
  modified_base 19: mod_base = OTHER; note = 2'-O-methylcytidine-3'-phosphorothioate
  modified_base 20: mod_base = OTHER; note = 2'-O-methyluridine-3'-phosphorothioate
  modified_base 21: mod_base = OTHER; note = 2'-O-methyladenosine
cagcaacacagtgactcccta

SEQ ID NO: 4024 - RNA, 21 nt, synthetic construct
  source 1..21: mol_type = other RNA
  modified_base 1: mod_base = OTHER; note = 2'-O-methyluridine-3'-phosphorothioate
  modified_base 2: mod_base = OTHER; note = 2'-O-methylguanosine-3'-phosphorothioate
  modified_base 3: mod_base = OTHER; note = 2'-O-methylcytidine-3'-phosphate
  modified_base 4: mod_base = OTHER; note = 2'-O-methylcytidine-3'-phosphate
  modified_base 5: mod_base = OTHER; note = 2'-O-methylcytidine-3'-phosphate
  modified_base 6: mod_base = OTHER; note = 2'-O-hexadecyl-uridine-3'-phosphate
  modified_base 7: mod_base = OTHER; note = 2'-deoxy-2'-fluoroadenosine-3'-phosphate
  modified_base 8: mod_base = OTHER; note = 2'-O-methylguanosine-3'-phosphate
  modified_base 9: mod_base = OTHER; note = 2'-deoxy-2'-fluoroguanosine-3'-phosphate
  modified_base 10: mod_base = OTHER; note = 2'-deoxy-2'-fluoroguanosine-3'-phosphate
  modified_base 11: mod_base = OTHER; note = 2'-deoxy-2'-fluoroadenosine-3'-phosphate
  modified_base 12: mod_base = OTHER; note = 2'-O-methylcytidine-3'-phosphate
  modified_base 13: mod_base = OTHER; note = 2'-O-methylcytidine-3'-phosphate
  modified_base 14: mod_base = OTHER; note = 2'-O-methyladenosine-3'-phosphate
  modified_base 15: mod_base = OTHER; note = 2'-O-methylcytidine-3'-phosphate
  modified_base 16: mod_base = OTHER; note = 2'-O-methylcytidine-3'-phosphate
  modified_base 17: mod_base = OTHER; note = 2'-O-methylcytidine-3'-phosphate
  modified_base 18: mod_base = OTHER; note = 2'-O-methyladenosine-3'-phosphate
  modified_base 19: mod_base = OTHER; note = 2'-O-methylcytidine-3'-phosphorothioate
  modified_base 20: mod_base = OTHER; note = 2'-O-methyladenosine-3'-phosphorothioate
  modified_base 21: mod_base = OTHER; note = 2'-O-methyladenosine
tgccctagggaccacccacaa

SEQ ID NO: 4025 - RNA, 21 nt, synthetic construct
  source 1..21: mol_type = other RNA
  modified_base 1: mod_base = OTHER; note = 2'-O-methyladenosine-3'-phosphorothioate
  modified_base 2: mod_base = OTHER; note = 2'-O-methylguanosine-3'-phosphorothioate
  modified_base 3: mod_base = OTHER; note = 2'-O-methyluridine-3'-phosphate
  modified_base 4: mod_base = OTHER; note = 2'-O-methylguanosine-3'-phosphate
  modified_base 5: mod_base = OTHER; note = 2'-O-methylcytidine-3'-phosphate
  modified_base 6: mod_base = OTHER; note = 2'-O-hexadecyl-cytidine-3'-phosphate
  modified_base 7: mod_base = OTHER; note = 2'-deoxy-2'-fluoroguanosine-3'-phosphate
  modified_base 8: mod_base = OTHER; note = 2'-O-methyladenosine-3'-phosphate
  modified_base 9: mod_base = OTHER; note = 2'-deoxy-2'-fluoroadenosine-3'-phosphate
  modified_base 10: mod_base = OTHER; note = 2'-deoxy-2'-fluorocytidine-3'-phosphate
  modified_base 11: mod_base = OTHER; note = 2'-deoxy-2'-fluoroadenosine-3'-phosphate
  modified_base 12: mod_base = OTHER; note = 2'-O-methylcytidine-3'-phosphate
  modified_base 13: mod_base = OTHER; note = 2'-O-methylcytidine-3'-phosphate
  modified_base 14: mod_base = OTHER; note = 2'-O-methyladenosine-3'-phosphate
  modified_base 15: mod_base = OTHER; note = 2'-O-methyluridine-3'-phosphate
  modified_base 16: mod_base = OTHER; note = 2'-O-methylguanosine-3'-phosphate
  modified_base 17: mod_base = OTHER; note = 2'-O-methylguanosine-3'-phosphate
  modified_base 18: mod_base = OTHER; note = 2'-O-methylcytidine-3'-phosphate
  modified_base 19: mod_base = OTHER; note = 2'-O-methylcytidine-3'-phosphorothioate
  modified_base 20: mod_base = OTHER; note = 2'-O-methyladenosine-3'-phosphorothioate
  modified_base 21: mod_base = OTHER; note = 2'-O-methyladenosine
agtgccgaacaccatggccaa

SEQ ID NO: 4026 - RNA, 21 nt, synthetic construct
  source 1..21: mol_type = other RNA
  modified_base 1: mod_base = OTHER; note = 2'-O-methyladenosine-3'-phosphorothioate
  modified_base 2: mod_base = OTHER; note = 2'-O-methylguanosine-3'-phosphorothioate
  modified_base 3: mod_base = OTHER; note = 2'-O-methylcytidine-3'-phosphate
  modified_base 4: mod_base = OTHER; note = 2'-O-methylcytidine-3'-phosphate
  modified_base 5: mod_base = OTHER; note = 2'-O-methyluridine-3'-phosphate
  modified_base 6: mod_base = OTHER; note = 2'-O-hexadecyl-guanosine-3'-phosphate
  modified_base 7: mod_base = OTHER; note = 2'-deoxy-2'-fluoroguanosine-3'-phosphate
  modified_base 8: mod_base = OTHER; note = 2'-O-methyladenosine-3'-phosphate
  modified_base 9: mod_base = OTHER; note = 2'-deoxy-2'-fluorocytidine-3'-phosphate
  modified_base 10: mod_base = OTHER; note = 2'-deoxy-2'-fluorouridine-3'-phosphate
  modified_base 11: mod_base = OTHER; note = 2'-deoxy-2'-fluorouridine-3'-phosphate
  modified_base 12: mod_base = OTHER; note = 2'-O-methylcytidine-3'-phosphate
  modified_base 13: mod_base = OTHER; note = 2'-O-methylguanosine-3'-phosphate
  modified_base 14: mod_base = OTHER; note = 2'-O-methylguanosine-3'-phosphate
  modified_base 15: mod_base = OTHER; note = 2'-O-methylcytidine-3'-phosphate
  modified_base 16: mod_base = OTHER; note = 2'-O-methylcytidine-3'-phosphate
  modified_base 17: mod_base = OTHER; note = 2'-O-methyladenosine-3'-phosphate
  modified_base 18: mod_base = OTHER; note = 2'-O-methylcytidine-3'-phosphate
  modified_base 19: mod_base = OTHER; note = 2'-O-methylcytidine-3'-phosphorothioate
  modified_base 20: mod_base = OTHER; note = 2'-O-methyluridine-3'-phosphorothioate
  modified_base 21: mod_base = OTHER; note = 2'-O-methyladenosine
agcctggacttcggccaccta

SEQ ID NO: 4027 - RNA, 21 nt, synthetic construct
  source 1..21: mol_type = other RNA
  modified_base 1: mod_base = OTHER; note = 2'-O-methyladenosine-3'-phosphorothioate
  modified_base 2: mod_base = OTHER; note = 2'-O-methylcytidine-3'-phosphorothioate
  modified_base 3: mod_base = OTHER; note = 2'-O-methylcytidine-3'-phosphate
  modified_base 4: mod_base = OTHER; note = 2'-O-methylcytidine-3'-phosphate
  modified_base 5: mod_base = OTHER; note = 2'-O-methyladenosine-3'-phosphate
  modified_base 6: mod_base = OTHER; note = 2'-O-hexadecyl-cytidine-3'-phosphate
  modified_base 7: mod_base = OTHER; note = 2'-deoxy-2'-fluoroadenosine-3'-phosphate
  modified_base 8: mod_base = OTHER; note = 2'-O-methyluridine-3'-phosphate
  modified_base 9: mod_base = OTHER; note = 2'-deoxy-2'-fluorocytidine-3'-phosphate
  modified_base 10: mod_base = OTHER; note = 2'-deoxy-2'-fluoroadenosine-3'-phosphate
  modified_base 11: mod_base = OTHER; note = 2'-deoxy-2'-fluorocytidine-3'-phosphate
  modified_base 12: mod_base = OTHER; note = 2'-O-methyladenosine-3'-phosphate
  modified_base 13: mod_base = OTHER; note = 2'-O-methylguanosine-3'-phosphate
  modified_base 14: mod_base = OTHER; note = 2'-O-methyladenosine-3'-phosphate
  modified_base 15: mod_base = OTHER; note = 2'-O-methylguanosine-3'-phosphate
  modified_base 16: mod_base = OTHER; note = 2'-O-methylcytidine-3'-phosphate
  modified_base 17: mod_base = OTHER; note = 2'-O-methylcytidine-3'-phosphate
  modified_base 18: mod_base = OTHER; note = 2'-O-methyluridine-3'-phosphate
  modified_base 19: mod_base = OTHER; note = 2'-O-methyluridine-3'-phosphorothioate
  modified_base 20: mod_base = OTHER; note = 2'-O-methylcytidine-3'-phosphorothioate
  modified_base 21: mod_base = OTHER; note = 2'-O-methyladenosine
acccacatcacagagccttca

SEQ ID NO: 4028 - RNA, 21 nt, synthetic construct
  source 1..21: mol_type = other RNA
  modified_base 1: mod_base = OTHER; note = 2'-O-methylguanosine-3'-phosphorothioate
  modified_base 2: mod_base = OTHER; note = 2'-O-methylguanosine-3'-phosphorothioate
  modified_base 3: mod_base = OTHER; note = 2'-O-methyluridine-3'-phosphate
  modified_base 4: mod_base = OTHER; note = 2'-O-methylguanosine-3'-phosphate
  modified_base 5: mod_base = OTHER; note = 2'-O-methyladenosine-3'-phosphate
  modified_base 6: mod_base = OTHER; note = 2'-O-hexadecyl-cytidine-3'-phosphate
  modified_base 7: mod_base = OTHER; note = 2'-deoxy-2'-fluorouridine-3'-phosphate
  modified_base 8: mod_base = OTHER; note = 2'-O-methyluridine-3'-phosphate
  modified_base 9: mod_base = OTHER; note = 2'-deoxy-2'-fluorocytidine-3'-phosphate
  modified_base 10: mod_base = OTHER; note = 2'-deoxy-2'-fluorocytidine-3'-phosphate
  modified_base 11: mod_base = OTHER; note = 2'-deoxy-2'-fluorocytidine-3'-phosphate
  modified_base 12: mod_base = OTHER; note = 2'-O-methyladenosine-3'-phosphate
  modified_base 13: mod_base = OTHER; note = 2'-O-methylcytidine-3'-phosphate
  modified_base 14: mod_base = OTHER; note = 2'-O-methyladenosine-3'-phosphate
  modified_base 15: mod_base = OTHER; note = 2'-O-methylcytidine-3'-phosphate
  modified_base 16: mod_base = OTHER; note = 2'-O-methylcytidine-3'-phosphate
  modified_base 17: mod_base = OTHER; note = 2'-O-methylcytidine-3'-phosphate
  modified_base 18: mod_base = OTHER; note = 2'-O-methyluridine-3'-phosphate
  modified_base 19: mod_base = OTHER; note = 2'-O-methyladenosine-3'-phosphorothioate
  modified_base 20: mod_base = OTHER; note = 2'-O-methylguanosine-3'-phosphorothioate
  modified_base 21: mod_base = OTHER; note = 2'-O-methyladenosine
ggtgacttcccacaccctaga

SEQ ID NO: 4029 - RNA, 21 nt, synthetic construct
  source 1..21: mol_type = other RNA
  modified_base 1: mod_base = OTHER; note = 2'-O-methylcytidine-3'-phosphorothioate
  modified_base 2: mod_base = OTHER; note = 2'-O-methyladenosine-3'-phosphorothioate
  modified_base 3: mod_base = OTHER; note = 2'-O-methyladenosine-3'-phosphate
  modified_base 4: mod_base = OTHER; note = 2'-O-methylcytidine-3'-phosphate
  modified_base 5: mod_base = OTHER; note = 2'-O-methylcytidine-3'-phosphate
  modified_base 6: mod_base = OTHER; note = 2'-O-hexadecyl-adenosine-3'-phosphate
  modified_base 7: mod_base = OTHER; note = 2'-deoxy-2'-fluorocytidine-3'-phosphate
  modified_base 8: mod_base = OTHER; note = 2'-O-methylcytidine-3'-phosphate
  modified_base 9: mod_base = OTHER; note = 2'-deoxy-2'-fluoroguanosine-3'-phosphate
  modified_base 10: mod_base = OTHER; note = 2'-deoxy-2'-fluoroguanosine-3'-phosphate
  modified_base 11: mod_base = OTHER; note = 2'-deoxy-2'-fluorouridine-3'-phosphate
  modified_base 12: mod_base = OTHER; note = 2'-O-methyladenosine-3'-phosphate
  modified_base 13: mod_base = OTHER; note = 2'-O-methylcytidine-3'-phosphate
  modified_base 14: mod_base = OTHER; note = 2'-O-methylcytidine-3'-phosphate
  modified_base 15: mod_base = OTHER; note = 2'-O-methyladenosine-3'-phosphate
  modified_base 16: mod_base = OTHER; note = 2'-O-methylcytidine-3'-phosphate
  modified_base 17: mod_base = OTHER; note = 2'-O-methylcytidine-3'-phosphate
  modified_base 18: mod_base = OTHER; note = 2'-O-methylcytidine-3'-phosphate
  modified_base 19: mod_base = OTHER; note = 2'-O-methyladenosine-3'-phosphorothioate
  modified_base 20: mod_base = OTHER; note = 2'-O-methylguanosine-3'-phosphorothioate
  modified_base 21: mod_base = OTHER; note = 2'-O-methyladenosine
caaccaccggtaccacccaga

SEQ ID NO: 4030 - RNA, 21 nt, synthetic construct
  source 1..21: mol_type = other RNA
  modified_base 1: mod_base = OTHER; note = 2'-O-methylcytidine-3'-phosphorothioate
  modified_base 2: mod_base = OTHER; note = 2'-O-methylguanosine-3'-phosphorothioate
  modified_base 3: mod_base = OTHER; note = 2'-O-methyladenosine-3'-phosphate
  modified_base 4: mod_base = OTHER; note = 2'-O-methylcytidine-3'-phosphate
  modified_base 5: mod_base = OTHER; note = 2'-O-methyluridine-3'-phosphate
  modified_base 6: mod_base = OTHER; note = 2'-O-hexadecyl-cytidine-3'-phosphate
  modified_base 7: mod_base = OTHER; note = 2'-deoxy-2'-fluorocytidine-3'-phosphate
  modified_base 8: mod_base = OTHER; note = 2'-O-methyladenosine-3'-phosphate
  modified_base 9: mod_base = OTHER; note = 2'-deoxy-2'-fluoroguanosine-3'-phosphate
  modified_base 10: mod_base = OTHER; note = 2'-deoxy-2'-fluorocytidine-3'-phosphate
  modified_base 11: mod_base = OTHER; note = 2'-deoxy-2'-fluorocytidine-3'-phosphate
  modified_base 12: mod_base = OTHER; note = 2'-O-methylcytidine-3'-phosphate
  modified_base 13: mod_base = OTHER; note = 2'-O-methyluridine-3'-phosphate
  modified_base 14: mod_base = OTHER; note = 2'-O-methyluridine-3'-phosphate
  modified_base 15: mod_base = OTHER; note = 2'-O-methyluridine-3'-phosphate
  modified_base 16: mod_base = OTHER; note = 2'-O-methylcytidine-3'-phosphate
  modified_base 17: mod_base = OTHER; note = 2'-O-methylcytidine-3'-phosphate
  modified_base 18: mod_base = OTHER; note = 2'-O-methyladenosine-3'-phosphate
  modified_base 19: mod_base = OTHER; note = 2'-O-methylguanosine-3'-phosphorothioate
  modified_base 20: mod_base = OTHER; note = 2'-O-methylcytidine-3'-phosphorothioate
  modified_base 21: mod_base = OTHER; note = 2'-O-methyladenosine
cgactccagccctttccagca

SEQ ID NO: 4031 - RNA, 21 nt, synthetic construct
  source 1..21: mol_type = other RNA
  modified_base 1: mod_base = OTHER; note = 2'-O-methyluridine-3'-phosphorothioate
  modified_base 2: mod_base = OTHER; note = 2'-O-methyladenosine-3'-phosphorothioate
  modified_base 3: mod_base = OTHER; note = 2'-O-methylguanosine-3'-phosphate
  modified_base 4: mod_base = OTHER; note = 2'-O-methylcytidine-3'-phosphate
  modified_base 5: mod_base = OTHER; note = 2'-O-methyladenosine-3'-phosphate
  modified_base 6: mod_base = OTHER; note = 2'-O-hexadecyl-guanosine-3'-phosphate
  modified_base 7: mod_base = OTHER; note = 2'-deoxy-2'-fluorocytidine-3'-phosphate
  modified_base 8: mod_base = OTHER; note = 2'-O-methyladenosine-3'-phosphate
  modified_base 9: mod_base = OTHER; note = 2'-deoxy-2'-fluoroguanosine-3'-phosphate
  modified_base 10: mod_base = OTHER; note = 2'-deoxy-2'-fluoroadenosine-3'-phosphate
  modified_base 11: mod_base = OTHER; note = 2'-deoxy-2'-fluoroadenosine-3'-phosphate
  modified_base 12: mod_base = OTHER; note = 2'-O-methylcytidine-3'-phosphate
  modified_base 13: mod_base = OTHER; note = 2'-O-methylcytidine-3'-phosphate
  modified_base 14: mod_base = OTHER; note = 2'-O-methyladenosine-3'-phosphate
  modified_base 15: mod_base = OTHER; note = 2'-O-methylcytidine-3'-phosphate
  modified_base 16: mod_base = OTHER; note = 2'-O-methylcytidine-3'-phosphate
  modified_base 17: mod_base = OTHER; note = 2'-O-methylguanosine-3'-phosphate
  modified_base 18: mod_base = OTHER; note = 2'-O-methyladenosine-3'-phosphate
  modified_base 19: mod_base = OTHER; note = 2'-O-methylguanosine-3'-phosphorothioate
  modified_base 20: mod_base = OTHER; note = 2'-O-methyluridine-3'-phosphorothioate
  modified_base 21: mod_base = OTHER; note = 2'-O-methyladenosine
tagcagcagaaccaccgagta

SEQ ID NO: 4032 - RNA, 21 nt, synthetic construct
  source 1..21: mol_type = other RNA
  modified_base 1: mod_base = OTHER; note = 2'-O-methyladenosine-3'-phosphorothioate
  modified_base 2: mod_base = OTHER; note = 2'-O-methylcytidine-3'-phosphorothioate
  modified_base 3: mod_base = OTHER; note = 2'-O-methylcytidine-3'-phosphate
  modified_base 4: mod_base = OTHER; note = 2'-O-methylcytidine-3'-phosphate
  modified_base 5: mod_base = OTHER; note = 2'-O-methyladenosine-3'-phosphate
  modified_base 6: mod_base = OTHER; note = 2'-O-hexadecyl-guanosine-3'-phosphate
  modified_base 7: mod_base = OTHER; note = 2'-deoxy-2'-fluorocytidine-3'-phosphate
  modified_base 8: mod_base = OTHER; note = 2'-O-methyladenosine-3'-phosphate
  modified_base 9: mod_base = OTHER; note = 2'-deoxy-2'-fluoroadenosine-3'-phosphate
  modified_base 10: mod_base = OTHER; note = 2'-deoxy-2'-fluoroguanosine-3'-phosphate
  modified_base 11: mod_base = OTHER; note = 2'-deoxy-2'-fluoroadenosine-3'-phosphate
  modified_base 12: mod_base = OTHER; note = 2'-O-methylcytidine-3'-phosphate
  modified_base 13: mod_base = OTHER; note = 2'-O-methylcytidine-3'-phosphate
  modified_base 14: mod_base = OTHER; note = 2'-O-methylcytidine-3'-phosphate
  modified_base 15: mod_base = OTHER; note = 2'-O-methylguanosine-3'-phosphate
  modified_base 16: mod_base = OTHER; note = 2'-O-methylcytidine-3'-phosphate
  modified_base 17: mod_base = OTHER; note = 2'-O-methyladenosine-3'-phosphate
  modified_base 18: mod_base = OTHER; note = 2'-O-methylcytidine-3'-phosphate
  modified_base 19: mod_base = OTHER; note = 2'-O-methylcytidine-3'-phosphorothioate
  modified_base 20: mod_base = OTHER; note = 2'-O-methyluridine-3'-phosphorothioate
  modified_base 21: mod_base = OTHER; note = 2'-O-methyladenosine
acccagcaagacccgcaccta

SEQ ID NO: 4033 - RNA, 21 nt, synthetic construct
  source 1..21: mol_type = other RNA
  modified_base 1: mod_base = OTHER; note = 2'-O-methylcytidine-3'-phosphorothioate
  modified_base 2: mod_base = OTHER; note = 2'-O-methylguanosine-3'-phosphorothioate
  modified_base 3: mod_base = OTHER; note = 2'-O-methylguanosine-3'-phosphate
  modified_base 4: mod_base = OTHER; note = 2'-O-methyluridine-3'-phosphate
  modified_base 5: mod_base = OTHER; note = 2'-O-methylguanosine-3'-phosphate
  modified_base 6: mod_base = OTHER; note = 2'-O-hexadecyl-guanosine-3'-phosphate
  modified_base 7: mod_base = OTHER; note = 2'-deoxy-2'-fluorouridine-3'-phosphate
  modified_base 8: mod_base = OTHER; note = 2'-O-methylguanosine-3'-phosphate
  modified_base 9: mod_base = OTHER; note = 2'-deoxy-2'-fluoroadenosine-3'-phosphate
  modified_base 10: mod_base = OTHER; note = 2'-deoxy-2'-fluorocytidine-3'-phosphate
  modified_base 11: mod_base = OTHER; note = 2'-deoxy-2'-fluorocytidine-3'-phosphate
  modified_base 12: mod_base = OTHER; note = 2'-O-methyladenosine-3'-phosphate
  modified_base 13: mod_base = OTHER; note = 2'-O-methyluridine-3'-phosphate
  modified_base 14: mod_base = OTHER; note = 2'-O-methylguanosine-3'-phosphate
  modified_base 15: mod_base = OTHER; note = 2'-O-methylguanosine-3'-phosphate
  modified_base 16: mod_base = OTHER; note = 2'-O-methylguanosine-3'-phosphate
  modified_base 17: mod_base = OTHER; note = 2'-O-methylcytidine-3'-phosphate
  modified_base 18: mod_base = OTHER; note = 2'-O-methyluridine-3'-phosphate
  modified_base 19: mod_base = OTHER; note = 2'-O-methylguanosine-3'-phosphorothioate
  modified_base 20: mod_base = OTHER; note = 2'-O-methyluridine-3'-phosphorothioate
  modified_base 21: mod_base = OTHER; note = 2'-O-methyladenosine
cggtggtgaccatgggctgta

SEQ ID NO: 4034 - RNA, 21 nt, synthetic construct
  source 1..21: mol_type = other RNA
  modified_base 1: mod_base = OTHER; note = 2'-O-methylguanosine-3'-phosphorothioate
  modified_base 2: mod_base = OTHER; note = 2'-O-methyluridine-3'-phosphorothioate
  modified_base 3: mod_base = OTHER; note = 2'-O-methylguanosine-3'-phosphate
  modified_base 4: mod_base = OTHER; note = 2'-O-methylguanosine-3'-phosphate
  modified_base 5: mod_base = OTHER; note = 2'-O-methylcytidine-3'-phosphate
  modified_base 6: mod_base = OTHER; note = 2'-O-hexadecyl-uridine-3'-phosphate
  modified_base 7: mod_base = OTHER; note = 2'-deoxy-2'-fluoroguanosine-3'-phosphate
  modified_base 8: mod_base = OTHER; note = 2'-O-methylguanosine-3'-phosphate
  modified_base 9: mod_base = OTHER; note = 2'-deoxy-2'-fluoroadenosine-3'-phosphate
  modified_base 10: mod_base = OTHER; note = 2'-deoxy-2'-fluorocytidine-3'-phosphate
  modified_base 11: mod_base = OTHER; note = 2'-deoxy-2'-fluorouridine-3'-phosphate
  modified_base 12: mod_base = OTHER; note = 2'-O-methyladenosine-3'-phosphate
  modified_base 13: mod_base = OTHER; note = 2'-O-methylcytidine-3'-phosphate
  modified_base 14: mod_base = OTHER; note = 2'-O-methyladenosine-3'-phosphate
  modified_base 15: mod_base = OTHER; note = 2'-O-methylguanosine-3'-phosphate
  modified_base 16: mod_base = OTHER; note = 2'-O-methylcytidine-3'-phosphate
  modified_base 17: mod_base = OTHER; note = 2'-O-methyluridine-3'-phosphate
  modified_base 18: mod_base = OTHER; note = 2'-O-methyladenosine-3'-phosphate
  modified_base 19: mod_base = OTHER; note = 2'-O-methylcytidine-3'-phosphorothioate
  modified_base 20: mod_base = OTHER; note = 2'-O-methylcytidine-3'-phosphorothioate
  modified_base 21: mod_base = OTHER; note = 2'-O-methyladenosine
gtggctggactacagctacca

SEQ ID NO: 4035 - RNA, 21 nt, synthetic construct
  source 1..21: mol_type = other RNA
  modified_base 1: mod_base = OTHER; note = 2'-O-methyluridine-3'-phosphorothioate
  modified_base 2: mod_base = OTHER; note = 2'-O-methyluridine-3'-phosphorothioate
  modified_base 3: mod_base = OTHER; note = 2'-O-methylguanosine-3'-phosphate
  modified_base 4: mod_base = OTHER; note = 2'-O-methyladenosine-3'-phosphate
  modified_base 5: mod_base = OTHER; note = 2'-O-methylcytidine-3'-phosphate
  modified_base 6: mod_base = OTHER; note = 2'-O-hexadecyl-adenosine-3'-phosphate
  modified_base 7: mod_base = OTHER; note = 2'-deoxy-2'-fluorocytidine-3'-phosphate
  modified_base 8: mod_base = OTHER; note = 2'-O-methylcytidine-3'-phosphate
  modified_base 9: mod_base = OTHER; note = 2'-deoxy-2'-fluorouridine-3'-phosphate
  modified_base 10: mod_base = OTHER; note = 2'-deoxy-2'-fluoroadenosine-3'-phosphate
  modified_base 11: mod_base = OTHER; note = 2'-deoxy-2'-fluorocytidine-3'-phosphate
  modified_base 12: mod_base = OTHER; note = 2'-O-methyluridine-3'-phosphate
  modified_base 13: mod_base = OTHER; note = 2'-O-methylcytidine-3'-phosphate
  modified_base 14: mod_base = OTHER; note = 2'-O-methylcytidine-3'-phosphate
  modified_base 15: mod_base = OTHER; note = 2'-O-methyladenosine-3'-phosphate
  modified_base 16: mod_base = OTHER; note = 2'-O-methyladenosine-3'-phosphate
  modified_base 17: mod_base = OTHER; note = 2'-O-methylcytidine-3'-phosphate
  modified_base 18: mod_base = OTHER; note = 2'-O-methyladenosine-3'-phosphate
  modified_base 19: mod_base = OTHER; note = 2'-O-methyluridine-3'-phosphorothioate
  modified_base 20: mod_base = OTHER; note = 2'-O-methylcytidine-3'-phosphorothioate
  modified_base 21: mod_base = OTHER; note = 2'-O-methyladenosine
ttgacacctactccaacatca

SEQ ID NO: 4036 - RNA, 21 nt, synthetic construct
  source 1..21: mol_type = other RNA
  modified_base 1: mod_base = OTHER; note = 2'-O-methyluridine-3'-phosphorothioate
  modified_base 2: mod_base = OTHER; note = 2'-O-methyluridine-3'-phosphorothioate
  modified_base 3: mod_base = OTHER; note = 2'-O-methylguanosine-3'-phosphate
  modified_base 4: mod_base = OTHER; note = 2'-O-methylguanosine-3'-phosphate
  modified_base 5: mod_base = OTHER; note = 2'-O-methylguanosine-3'-phosphate
  modified_base 6: mod_base = OTHER; note = 2'-O-hexadecyl-cytidine-3'-phosphate
  modified_base 7: mod_base = OTHER; note = 2'-deoxy-2'-fluorocytidine-3'-phosphate
  modified_base 8: mod_base = OTHER; note = 2'-O-methyladenosine-3'-phosphate
  modified_base 9: mod_base = OTHER; note = 2'-deoxy-2'-fluoroguanosine-3'-phosphate
  modified_base 10: mod_base = OTHER; note = 2'-deoxy-2'-fluoroguanosine-3'-phosphate
  modified_base 11: mod_base = OTHER; note = 2'-deoxy-2'-fluorouridine-3'-phosphate
  modified_base 12: mod_base = OTHER; note = 2'-O-methylcytidine-3'-phosphate
  modified_base 13: mod_base = OTHER; note = 2'-O-methylguanosine-3'-phosphate
  modified_base 14: mod_base = OTHER; note = 2'-O-methyluridine-3'-phosphate
  modified_base 15: mod_base = OTHER; note = 2'-O-methylguanosine-3'-phosphate
  modified_base 16: mod_base = OTHER; note = 2'-O-methylguanosine-3'-phosphate
  modified_base 17: mod_base = OTHER; note = 2'-O-methyladenosine-3'-phosphate
  modified_base 18: mod_base = OTHER; note = 2'-O-methyladenosine-3'-phosphate
  modified_base 19: mod_base = OTHER; note = 2'-O-methyluridine-3'-phosphorothioate
  modified_base 20: mod_base = OTHER; note = 2'-O-methylguanosine-3'-phosphorothioate
  modified_base 21: mod_base = OTHER; note = 2'-O-methyladenosine
ttgggccaggtcgtggaatga

SEQ ID NO: 4037 - RNA, 21 nt, synthetic construct
  source 1..21: mol_type = other RNA
  modified_base 1: mod_base = OTHER; note = 2'-O-methylcytidine-3'-phosphorothioate
  modified_base 2: mod_base = OTHER; note = 2'-O-methylcytidine-3'-phosphorothioate
  modified_base 3: mod_base = OTHER; note = 2'-O-methyluridine-3'-phosphate
  modified_base 4: mod_base = OTHER; note = 2'-O-methylguanosine-3'-phosphate
  modified_base 5: mod_base = OTHER; note = 2'-O-methylguanosine-3'-phosphate
  modified_base 6: mod_base = OTHER; note = 2'-O-hexadecyl-adenosine-3'-phosphate
  modified_base 7: mod_base = OTHER; note = 2'-deoxy-2'-fluorocytidine-3'-phosphate
  modified_base 8: mod_base = OTHER; note = 2'-O-methyluridine-3'-phosphate
  modified_base 9: mod_base = OTHER; note = 2'-deoxy-2'-fluorouridine-3'-phosphate
  modified_base 10: mod_base = OTHER; note = 2'-deoxy-2'-fluorouridine-3'-phosphate
  modified_base 11: mod_base = OTHER; note = 2'-deoxy-2'-fluoroguanosine-3'-phosphate
  modified_base 12: mod_base = OTHER; note = 2'-O-methylguanosine-3'-phosphate
  modified_base 13: mod_base = OTHER; note = 2'-O-methylcytidine-3'-phosphate
  modified_base 14: mod_base = OTHER; note = 2'-O-methylcytidine-3'-phosphate
  modified_base 15: mod_base = OTHER; note = 2'-O-methyluridine-3'-phosphate
  modified_base 16: mod_base = OTHER; note = 2'-O-methylguanosine-3'-phosphate
  modified_base 17: mod_base = OTHER; note = 2'-O-methylguanosine-3'-phosphate
  modified_base 18: mod_base = OTHER; note = 2'-O-methyluridine-3'-phosphate
  modified_base 19: mod_base = OTHER; note = 2'-O-methylcytidine-3'-phosphorothioate
  modified_base 20: mod_base = OTHER; note = 2'-O-methyluridine-3'-phosphorothioate
  modified_base 21: mod_base = OTHER; note = 2'-O-methyladenosine
cctggactttggcctggtcta

SEQ ID NO: 4038 - RNA, 21 nt, synthetic construct
  source 1..21: mol_type = other RNA
  modified_base 1: mod_base = OTHER; note = 2'-O-methyladenosine-3'-phosphorothioate
  modified_base 2: mod_base = OTHER; note = 2'-O-methyluridine-3'-phosphorothioate
  modified_base 3: mod_base = OTHER; note = 2'-O-methylguanosine-3'-phosphate
  modified_base 4: mod_base = OTHER; note = 2'-O-methyluridine-3'-phosphate
  modified_base 5: mod_base = OTHER; note = 2'-O-methylguanosine-3'-phosphate
  modified_base 6: mod_base = OTHER; note = 2'-O-hexadecyl-cytidine-3'-phosphate
  modified_base 7: mod_base = OTHER; note = 2'-deoxy-2'-fluorouridine-3'-phosphate
  modified_base 8: mod_base = OTHER; note = 2'-O-methyluridine-3'-phosphate
  modified_base 9: mod_base = OTHER; note = 2'-deoxy-2'-fluorocytidine-3'-phosphate
  modified_base 10: mod_base = OTHER; note = 2'-deoxy-2'-fluoroadenosine-3'-phosphate
  modified_base 11: mod_base = OTHER; note = 2'-deoxy-2'-fluoroadenosine-3'-phosphate
  modified_base 12: mod_base = OTHER; note = 2'-O-methylcytidine-3'-phosphate
  modified_base 13: mod_base = OTHER; note = 2'-O-methyluridine-3'-phosphate
  modified_base 14: mod_base = OTHER; note = 2'-O-methyladenosine-3'-phosphate
  modified_base 15: mod_base = OTHER; note = 2'-O-methyluridine-3'-phosphate
  modified_base 16: mod_base = OTHER; note = 2'-O-methylguanosine-3'-phosphate
  modified_base 17: mod_base = OTHER; note = 2'-O-methyladenosine-3'-phosphate
  modified_base 18: mod_base = OTHER; note = 2'-O-methyladenosine-3'-phosphate
  modified_base 19: mod_base = OTHER; note = 2'-O-methyladenosine-3'-phosphorothioate
  modified_base 20: mod_base = OTHER; note = 2'-O-methyluridine-3'-phosphorothioate
  modified_base 21: mod_base = OTHER; note = 2'-O-methyladenosine
atgtgcttcaactatgaaata

SEQ ID NO: 4039 - RNA, 21 nt, synthetic construct
  source 1..21: mol_type = other RNA
  modified_base 1: mod_base = OTHER; note = 2'-O-methyluridine-3'-phosphorothioate
  modified_base 2: mod_base = OTHER; note = 2'-O-methylguanosine-3'-phosphorothioate
  modified_base 3: mod_base = OTHER; note = 2'-O-methyluridine-3'-phosphate
  modified_base 4: mod_base = OTHER; note = 2'-O-methylguanosine-3'-phosphate
  modified_base 5: mod_base = OTHER; note = 2'-O-methyluridine-3'-phosphate
  modified_base 6: mod_base = OTHER; note = 2'-O-hexadecyl-uridine-3'-phosphate
  modified_base 7: mod_base = OTHER; note = 2'-deoxy-2'-fluorocytidine-3'-phosphate
  modified_base 8: mod_base = OTHER; note = 2'-O-methyluridine-3'-phosphate
  modified_base 9: mod_base = OTHER; note = 2'-deoxy-2'-fluoroguanosine-3'-phosphate
  modified_base 10: mod_base = OTHER; note = 2'-deoxy-2'-fluorocytidine-3'-phosphate
  modified_base 11: mod_base = OTHER; note = 2'-deoxy-2'-fluorouridine-3'-phosphate
  modified_base 12: mod_base = OTHER; note = 2'-O-methylguanosine-3'-phosphate
  modified_base 13: mod_base = OTHER; note = 2'-O-methylcytidine-3'-phosphate
  modified_base 14: mod_base = OTHER; note = 2'-O-methyladenosine-3'-phosphate
  modified_base 15: mod_base = OTHER; note = 2'-O-methyladenosine-3'-phosphate
  modified_base 16: mod_base = OTHER; note = 2'-O-methylcytidine-3'-phosphate
  modified_base 17: mod_base = OTHER; note = 2'-O-methyluridine-3'-phosphate
  modified_base 18: mod_base = OTHER; note = 2'-O-methyladenosine-3'-phosphate
  modified_base 19: mod_base = OTHER; note = 2'-O-methylcytidine-3'-phosphorothioate
  modified_base 20: mod_base = OTHER; note = 2'-O-methylguanosine-3'-phosphorothioate
  modified_base 21: mod_base = OTHER; note = 2'-O-methyladenosine
tgtgttctgctgcaactacga

SEQ ID NO: 4040 - RNA, 21 nt, synthetic construct
  source 1..21: mol_type = other RNA
  modified_base 1: mod_base = OTHER; note = 2'-O-methylcytidine-3'-phosphorothioate
  modified_base 2: mod_base = OTHER; note = 2'-O-methyladenosine-3'-phosphorothioate
  modified_base 3: mod_base = OTHER; note = 2'-O-methylguanosine-3'-phosphate
  modified_base 4: mod_base = OTHER; note = 2'-O-methylcytidine-3'-phosphate
  modified_base 5: mod_base = OTHER; note = 2'-O-methyluridine-3'-phosphate
  modified_base 6: mod_base = OTHER; note = 2'-O-hexadecyl-cytidine-3'-phosphate
  modified_base 7: mod_base = OTHER; note = 2'-deoxy-2'-fluorouridine-3'-phosphate
  modified_base 8: mod_base = OTHER; note = 2'-O-methyladenosine-3'-phosphate
  modified_base 9: mod_base = OTHER; note = 2'-deoxy-2'-fluorocytidine-3'-phosphate
  modified_base 10: mod_base = OTHER; note = 2'-deoxy-2'-fluoroguanosine-3'-phosphate
  modified_base 11: mod_base = OTHER; note = 2'-deoxy-2'-fluoroguanosine-3'-phosphate
  modified_base 12: mod_base = OTHER; note = 2'-O-methylcytidine-3'-phosphate
  modified_base 13: mod_base = OTHER; note = 2'-O-methylcytidine-3'-phosphate
  modified_base 14: mod_base = OTHER; note = 2'-O-methyladenosine-3'-phosphate
  modified_base 15: mod_base = OTHER; note = 2'-O-methyluridine-3'-phosphate
  modified_base 16: mod_base = OTHER; note = 2'-O-methylguanosine-3'-phosphate
  modified_base 17: mod_base = OTHER; note = 2'-O-methylcytidine-3'-phosphate
  modified_base 18: mod_base = OTHER; note = 2'-O-methylcytidine-3'-phosphate
  modified_base 19: mod_base = OTHER; note = 2'-O-methylcytidine-3'-phosphorothioate
  modified_base 20: mod_base = OTHER; note = 2'-O-methyluridine-3'-phosphorothioate
  modified_base 21: mod_base = OTHER; note = 2'-O-methyladenosine
cagctctacggccatgcccta

SEQ ID NO: 4041 - RNA, 21 nt, synthetic construct
  source 1..21: mol_type = other RNA
  modified_base 1: mod_base = OTHER; note = 2'-O-methyladenosine-3'-phosphorothioate
  modified_base 2: mod_base = OTHER; note = 2'-O-methyluridine-3'-phosphorothioate
  modified_base 3: mod_base = OTHER; note = 2'-O-methylcytidine-3'-phosphate
  modified_base 4: mod_base = OTHER; note = 2'-O-methylcytidine-3'-phosphate
  modified_base 5: mod_base = OTHER; note = 2'-O-methyluridine-3'-phosphate
  modified_base 6: mod_base = OTHER; note = 2'-O-hexadecyl-cytidine-3'-phosphate
  modified_base 7: mod_base = OTHER; note = 2'-deoxy-2'-fluoroadenosine-3'-phosphate
  modified_base 8: mod_base = OTHER; note = 2'-O-methylcytidine-3'-phosphate
  modified_base 9: mod_base = OTHER; note = 2'-deoxy-2'-fluoroadenosine-3'-phosphate
  modified_base 10: mod_base = OTHER; note = 2'-deoxy-2'-fluoroguanosine-3'-phosphate
  modified_base 11: mod_base = OTHER; note = 2'-deoxy-2'-fluoroadenosine-3'-phosphate
  modified_base 12: mod_base = OTHER; note = 2'-O-methylguanosine-3'-phosphate
  modified_base 13: mod_base = OTHER; note = 2'-O-methylcytidine-3'-phosphate
  modified_base 14: mod_base = OTHER; note = 2'-O-methyluridine-3'-phosphate
  modified_base 15: mod_base = OTHER; note = 2'-O-methylguanosine-3'-phosphate
  modified_base 16: mod_base = OTHER; note = 2'-O-methyladenosine-3'-phosphate
  modified_base 17: mod_base = OTHER; note = 2'-O-methylcytidine-3'-phosphate
  modified_base 18: mod_base = OTHER; note = 2'-O-methylcytidine-3'-phosphate
  modified_base 19: mod_base = OTHER; note = 2'-O-methyladenosine-3'-phosphorothioate
  modified_base 20: mod_base = OTHER; note = 2'-O-methylcytidine-3'-phosphorothioate
  modified_base 21: mod_base = OTHER; note = 2'-O-methyladenosine
atcctcacagagctgaccaca

SEQ ID NO: 4042 - RNA, 21 nt, synthetic construct
  source 1..21: mol_type = other RNA
  modified_base 1: mod_base = OTHER; note = 2'-O-methylcytidine-3'-phosphorothioate
  modified_base 2: mod_base = OTHER; note = 2'-O-methylcytidine-3'-phosphorothioate
  modified_base 3: mod_base = OTHER; note = 2'-O-methyladenosine-3'-phosphate
  modified_base 4: mod_base = OTHER; note = 2'-O-methylcytidine-3'-phosphate
  modified_base 5: mod_base = OTHER; note = 2'-O-methyluridine-3'-phosphate
  modified_base 6: mod_base = OTHER; note = 2'-O-hexadecyl-adenosine-3'-phosphate
  modified_base 7: mod_base = OTHER; note = 2'-deoxy-2'-fluorocytidine-3'-phosphate
  modified_base 8: mod_base = OTHER; note = 2'-O-methylguanosine-3'-phosphate
  modified_base 9: mod_base = OTHER; note = 2'-deoxy-2'-fluoroadenosine-3'-phosphate
  modified_base 10: mod_base = OTHER; note = 2'-deoxy-2'-fluorocytidine-3'-phosphate
  modified_base 11: mod_base = OTHER; note = 2'-deoxy-2'-fluorouridine-3'-phosphate
  modified_base 12: mod_base = OTHER; note = 2'-O-methylguanosine-3'-phosphate
  modified_base 13: mod_base = OTHER; note = 2'-O-methyladenosine-3'-phosphate
  modified_base 14: mod_base = OTHER; note = 2'-O-methylguanosine-3'-phosphate
  modified_base 15: mod_base = OTHER; note = 2'-O-methyluridine-3'-phosphate
  modified_base 16: mod_base = OTHER; note = 2'-O-methylcytidine-3'-phosphate
  modified_base 17: mod_base = OTHER; note = 2'-O-methylcytidine-3'-phosphate
  modified_base 18: mod_base = OTHER; note = 2'-O-methyladenosine-3'-phosphate
  modified_base 19: mod_base = OTHER; note = 2'-O-methylcytidine-3'-phosphorothioate
  modified_base 20: mod_base = OTHER; note = 2'-O-methyluridine-3'-phosphorothioate
  modified_base 21: mod_base = OTHER; note = 2'-O-methyladenosine
ccactacgactgagtccacta

SEQ ID NO: 4043 - RNA, 21 nt, synthetic construct
  source 1..21: mol_type = other RNA
  modified_base 1: mod_base = OTHER; note = 2'-O-methylguanosine-3'-phosphorothioate
  modified_base 2: mod_base = OTHER; note = 2'-O-methyladenosine-3'-phosphorothioate
  modified_base 3: mod_base = OTHER; note = 2'-O-methylcytidine-3'-phosphate
  modified_base 4: mod_base = OTHER; note = 2'-O-methylcytidine-3'-phosphate
  modified_base 5: mod_base = OTHER; note = 2'-O-methyladenosine-3'-phosphate
  modified_base 6: mod_base = OTHER; note = 2'-O-hexadecyl-cytidine-3'-phosphate
  modified_base 7: mod_base = OTHER; note = 2'-deoxy-2'-fluorocytidine-3'-phosphate
  modified_base 8: mod_base = OTHER; note = 2'-O-methyluridine-3'-phosphate
  modified_base 9: mod_base = OTHER; note = 2'-deoxy-2'-fluoroguanosine-3'-phosphate
  modified_base 10: mod_base = OTHER; note = 2'-deoxy-2'-fluoroguanosine-3'-phosphate
  modified_base 11: mod_base = OTHER; note = 2'-deoxy-2'-fluoroadenosine-3'-phosphate
  modified_base 12: mod_base = OTHER; note = 2'-O-methyluridine-3'-phosphate
  modified_base 13: mod_base = OTHER; note = 2'-O-methylcytidine-3'-phosphate
  modified_base 14: mod_base = OTHER; note = 2'-O-methylcytidine-3'-phosphate
  modified_base 15: mod_base = OTHER; note = 2'-O-methyluridine-3'-phosphate
  modified_base 16: mod_base = OTHER; note = 2'-O-methylcytidine-3'-phosphate
  modified_base 17: mod_base = OTHER; note = 2'-O-methyladenosine-3'-phosphate
  modified_base 18: mod_base = OTHER; note = 2'-O-methylcytidine-3'-phosphate
  modified_base 19: mod_base = OTHER; note = 2'-O-methyladenosine-3'-phosphorothioate
  modified_base 20: mod_base = OTHER; note = 2'-O-methylguanosine-3'-phosphorothioate
  modified_base 21: mod_base = OTHER; note = 2'-O-methyladenosine
gaccacctggatcctcacaga

SEQ ID NO: 4044 - RNA, 21 nt, synthetic construct
  source 1..21: mol_type = other RNA
  modified_base 1: mod_base = OTHER; note = 2'-O-methylguanosine-3'-phosphorothioate
  modified_base 2: mod_base = OTHER; note = 2'-O-methyladenosine-3'-phosphorothioate
  modified_base 3: mod_base = OTHER; note = 2'-O-methylguanosine-3'-phosphate
  modified_base 4: mod_base = OTHER; note = 2'-O-methylcytidine-3'-phosphate
  modified_base 5: mod_base = OTHER; note = 2'-O-methyladenosine-3'-phosphate
  modified_base 6: mod_base = OTHER; note = 2'-O-hexadecyl-cytidine-3'-phosphate
  modified_base 7: mod_base = OTHER; note = 2'-deoxy-2'-fluorouridine-3'-phosphate
  modified_base 8: mod_base = OTHER; note = 2'-O-methyladenosine-3'-phosphate
  modified_base 9: mod_base = OTHER; note = 2'-deoxy-2'-fluorocytidine-3'-phosphate
  modified_base 10: mod_base = OTHER; note = 2'-deoxy-2'-fluoroadenosine-3'-phosphate
  modified_base 11: mod_base = OTHER; note = 2'-deoxy-2'-fluoroguanosine-3'-phosphate
  modified_base 12: mod_base = OTHER; note = 2'-O-methylcytidine-3'-phosphate
  modified_base 13: mod_base = OTHER; note = 2'-O-methylcytidine-3'-phosphate
  modified_base 14: mod_base = OTHER; note = 2'-O-methyladenosine-3'-phosphate
  modified_base 15: mod_base = OTHER; note = 2'-O-methylcytidine-3'-phosphate
  modified_base 16: mod_base = OTHER; note = 2'-O-methylcytidine-3'-phosphate
  modified_base 17: mod_base = OTHER; note = 2'-O-methylguanosine-3'-phosphate
  modified_base 18: mod_base = OTHER; note = 2'-O-methyluridine-3'-phosphate
  modified_base 19: mod_base = OTHER; note = 2'-O-methylguanosine-3'-phosphorothioate
  modified_base 20: mod_base = OTHER; note = 2'-O-methyladenosine-3'-phosphorothioate
  modified_base 21: mod_base = OTHER; note = 2'-O-methyladenosine
gagcactacagccaccgtgaa

SEQ ID NO: 4045 - RNA, 21 nt, synthetic construct
  source 1..21: mol_type = other RNA
  modified_base 1: mod_base = OTHER; note = 2'-O-methylcytidine-3'-phosphorothioate
  modified_base 2: mod_base = OTHER; note = 2'-O-methylcytidine-3'-phosphorothioate
  modified_base 3: mod_base = OTHER; note = 2'-O-methyluridine-3'-phosphate
  modified_base 4: mod_base = OTHER; note = 2'-O-methylcytidine-3'-phosphate
  modified_base 5: mod_base = OTHER; note = 2'-O-methylcytidine-3'-phosphate
  modified_base 6: mod_base = OTHER; note = 2'-O-hexadecyl-adenosine-3'-phosphate
  modified_base 7: mod_base = OTHER; note = 2'-deoxy-2'-fluorocytidine-3'-phosphate
  modified_base 8: mod_base = OTHER; note = 2'-O-methylcytidine-3'-phosphate
  modified_base 9: mod_base = OTHER; note = 2'-deoxy-2'-fluorocytidine-3'-phosphate
  modified_base 10: mod_base = OTHER; note = 2'-deoxy-2'-fluoroadenosine-3'-phosphate
  modified_base 11: mod_base = OTHER; note = 2'-deoxy-2'-fluoroguanosine-3'-phosphate
  modified_base 12: mod_base = OTHER; note = 2'-O-methylguanosine-3'-phosphate
  modified_base 13: mod_base = OTHER; note = 2'-O-methylcytidine-3'-phosphate
  modified_base 14: mod_base = OTHER; note = 2'-O-methyladenosine-3'-phosphate
  modified_base 15: mod_base = OTHER; note = 2'-O-methyladenosine-3'-phosphate
  modified_base 16: mod_base = OTHER; note = 2'-O-methylcytidine-3'-phosphate
  modified_base 17: mod_base = OTHER; note = 2'-O-methyluridine-3'-phosphate
  modified_base 18: mod_base = OTHER; note = 2'-O-methylguanosine-3'-phosphate
  modified_base 19: mod_base = OTHER; note = 2'-O-methylcytidine-3'-phosphorothioate
  modified_base 20: mod_base = OTHER; note = 2'-O-methyluridine-3'-phosphorothioate
  modified_base 21: mod_base = OTHER; note = 2'-O-methyladenosine
cctccacccaggcaactgcta

SEQ ID NO: 4046 - RNA, 21 nt, synthetic construct
  source 1..21: mol_type = other RNA
  modified_base 1: mod_base = OTHER; note = 2'-O-methylguanosine-3'-phosphorothioate
  modified_base 2: mod_base = OTHER; note = 2'-O-methylguanosine-3'-phosphorothioate
  modified_base 3: mod_base = OTHER; note = 2'-O-methylcytidine-3'-phosphate
  modified_base 4: mod_base = OTHER; note = 2'-O-methylcytidine-3'-phosphate
  modified_base 5: mod_base = OTHER; note = 2'-O-methyladenosine-3'-phosphate
  modified_base 6: mod_base = OTHER; note = 2'-O-hexadecyl-cytidine-3'-phosphate
  modified_base 7: mod_base = OTHER; note = 2'-deoxy-2'-fluoroguanosine-3'-phosphate
  modified_base 8: mod_base = OTHER; note = 2'-O-methyladenosine-3'-phosphate
  modified_base 9: mod_base = OTHER; note = 2'-deoxy-2'-fluorocytidine-3'-phosphate
  modified_base 10: mod_base = OTHER; note = 2'-deoxy-2'-fluoroadenosine-3'-phosphate
  modified_base 11: mod_base = OTHER; note = 2'-deoxy-2'-fluorocytidine-3'-phosphate
  modified_base 12: mod_base = OTHER; note = 2'-O-methylcytidine-3'-phosphate
  modified_base 13: mod_base = OTHER; note = 2'-O-methylcytidine-3'-phosphate
  modified_base 14: mod_base = OTHER; note = 2'-O-methyladenosine-3'-phosphate
  modified_base 15: mod_base = OTHER; note = 2'-O-methylcytidine-3'-phosphate
  modified_base 16: mod_base = OTHER; note = 2'-O-methyladenosine-3'-phosphate
  modified_base 17: mod_base = OTHER; note = 2'-O-methylguanosine-3'-phosphate
  modified_base 18: mod_base = OTHER; note = 2'-O-methyluridine-3'-phosphate
  modified_base 19: mod_base = OTHER; note = 2'-O-methylcytidine-3'-phosphorothioate
  modified_base 20: mod_base = OTHER; note = 2'-O-methyladenosine-3'-phosphorothioate
  modified_base 21: mod_base = OTHER; note = 2'-O-methyladenosine
ggccacgacacccacagtcaa

SEQ ID NO: 4047 - RNA, 21 nt, synthetic construct
  source 1..21: mol_type = other RNA
  modified_base 1: mod_base = OTHER; note = 2'-O-methylguanosine-3'-phosphorothioate
  modified_base 2: mod_base = OTHER; note = 2'-O-methylcytidine-3'-phosphorothioate
  modified_base 3: mod_base = OTHER; note = 2'-O-methyluridine-3'-phosphate
  modified_base 4: mod_base = OTHER; note = 2'-O-methylcytidine-3'-phosphate
  modified_base 5: mod_base = OTHER; note = 2'-O-methylcytidine-3'-phosphate
  modified_base 6: mod_base = OTHER; note = 2'-O-hexadecyl-adenosine-3'-phosphate
  modified_base 7: mod_base = OTHER; note = 2'-deoxy-2'-fluoroadenosine-3'-phosphate
  modified_base 8: mod_base = OTHER; note = 2'-O-methyladenosine-3'-phosphate
  modified_base 9: mod_base = OTHER; note = 2'-deoxy-2'-fluoroguanosine-3'-phosphate
  modified_base 10: mod_base = OTHER; note = 2'-deoxy-2'-fluorocytidine-3'-phosphate
  modified_base 11: mod_base = OTHER; note = 2'-deoxy-2'-fluorocytidine-3'-phosphate
  modified_base 12: mod_base = OTHER; note = 2'-O-methyladenosine-3'-phosphate
  modified_base 13: mod_base = OTHER; note = 2'-O-methylcytidine-3'-phosphate
  modified_base 14: mod_base = OTHER; note = 2'-O-methyluridine-3'-phosphate
  modified_base 15: mod_base = OTHER; note = 2'-O-methylcytidine-3'-phosphate
  modified_base 16: mod_base = OTHER; note = 2'-O-methylcytidine-3'-phosphate
  modified_base 17: mod_base = OTHER; note = 2'-O-methylcytidine-3'-phosphate
  modified_base 18: mod_base = OTHER; note = 2'-O-methyluridine-3'-phosphate
  modified_base 19: mod_base = OTHER; note = 2'-O-methyluridine-3'-phosphorothioate
  modified_base 20: mod_base = OTHER; note = 2'-O-methylcytidine-3'-phosphorothioate
  modified_base 21: mod_base = OTHER; note = 2'-O-methyladenosine
gctccaaagccactcccttca

SEQ ID NO: 4048 - RNA, 21 nt, synthetic construct
  source 1..21: mol_type = other RNA
  modified_base 1: mod_base = OTHER; note = 2'-O-methyladenosine-3'-phosphorothioate
  modified_base 2: mod_base = OTHER; note = 2'-O-methylcytidine-3'-phosphorothioate
  modified_base 3: mod_base = OTHER; note = 2'-O-methyladenosine-3'-phosphate
  modified_base 4: mod_base = OTHER; note = 2'-O-methylguanosine-3'-phosphate
  modified_base 5: mod_base = OTHER; note = 2'-O-methylcytidine-3'-phosphate
  modified_base 6: mod_base = OTHER; note = 2'-O-hexadecyl-uridine-3'-phosphate
  modified_base 7: mod_base = OTHER; note = 2'-deoxy-2'-fluoroadenosine-3'-phosphate
  modified_base 8: mod_base = OTHER; note = 2'-O-methylcytidine-3'-phosphate
  modified_base 9: mod_base = OTHER; note = 2'-deoxy-2'-fluorocytidine-3'-phosphate
  modified_base 10: mod_base = OTHER; note = 2'-deoxy-2'-fluoroadenosine-3'-phosphate
  modified_base 11: mod_base = OTHER; note = 2'-deoxy-2'-fluoroguanosine-3'-phosphate
  modified_base 12: mod_base = OTHER; note = 2'-O-methylcytidine-3'-phosphate
  modified_base 13: mod_base = OTHER; note = 2'-O-methyluridine-3'-phosphate
  modified_base 14: mod_base = OTHER; note = 2'-O-methyluridine-3'-phosphate
  modified_base 15: mod_base = OTHER; note = 2'-O-methyluridine-3'-phosphate
  modified_base 16: mod_base = OTHER; note = 2'-O-methyladenosine-3'-phosphate
  modified_base 17: mod_base = OTHER; note = 2'-O-methylcytidine-3'-phosphate
  modified_base 18: mod_base = OTHER; note = 2'-O-methyladenosine-3'-phosphate
  modified_base 19: mod_base = OTHER; note = 2'-O-methylguanosine-3'-phosphorothioate
  modified_base 20: mod_base = OTHER; note = 2'-O-methylcytidine-3'-phosphorothioate
  modified_base 21: mod_base = OTHER; note = 2'-O-methyladenosine
acagctaccagctttacagca

SEQ ID NO: 4049 - RNA, 21 nt, synthetic construct
  source 1..21: mol_type = other RNA
  modified_base 1: mod_base = OTHER; note = 2'-O-methyluridine-3'-phosphorothioate
  modified_base 2: mod_base = OTHER; note = 2'-O-methylcytidine-3'-phosphorothioate
  modified_base 3: mod_base = OTHER; note = 2'-O-methylcytidine-3'-phosphate
  modified_base 4: mod_base = OTHER; note = 2'-O-methyluridine-3'-phosphate
  modified_base 5: mod_base = OTHER; note = 2'-O-methylcytidine-3'-phosphate
  modified_base 6: mod_base = OTHER; note = 2'-O-hexadecyl-cytidine-3'-phosphate
  modified_base 7: mod_base = OTHER; note = 2'-deoxy-2'-fluoroadenosine-3'-phosphate
  modified_base 8: mod_base = OTHER; note = 2'-O-methylcytidine-3'-phosphate
  modified_base 9: mod_base = OTHER; note = 2'-deoxy-2'-fluorouridine-3'-phosphate
  modified_base 10: mod_base = OTHER; note = 2'-deoxy-2'-fluorocytidine-3'-phosphate
  modified_base 11: mod_base = OTHER; note = 2'-deoxy-2'-fluorocytidine-3'-phosphate
  modified_base 12: mod_base = OTHER; note = 2'-O-methyladenosine-3'-phosphate
  modified_base 13: mod_base = OTHER; note = 2'-O-methylguanosine-3'-phosphate
  modified_base 14: mod_base = OTHER; note = 2'-O-methyladenosine-3'-phosphate
  modified_base 15: mod_base = OTHER; note = 2'-O-methylguanosine-3'-phosphate
  modified_base 16: mod_base = OTHER; note = 2'-O-methyladenosine-3'-phosphate
  modified_base 17: mod_base = OTHER; note = 2'-O-methylcytidine-3'-phosphate
  modified_base 18: mod_base = OTHER; note = 2'-O-methyluridine-3'-phosphate
  modified_base 19: mod_base = OTHER; note = 2'-O-methylguanosine-3'-phosphorothioate
  modified_base 20: mod_base = OTHER; note = 2'-O-methyluridine-3'-phosphorothioate
  modified_base 21: mod_base = OTHER; note = 2'-O-methyladenosine
tcctccactccagagactgta

SEQ ID NO: 4050 - RNA, 21 nt, synthetic construct
  source 1..21: mol_type = other RNA
  modified_base 1: mod_base = OTHER; note = 2'-O-methylcytidine-3'-phosphorothioate
  modified_base 2: mod_base = OTHER; note = 2'-O-methylcytidine-3'-phosphorothioate
  modified_base 3: mod_base = OTHER; note = 2'-O-methyladenosine-3'-phosphate
  modified_base 4: mod_base = OTHER; note = 2'-O-methylcytidine-3'-phosphate
  modified_base 5: mod_base = OTHER; note = 2'-O-methyladenosine-3'-phosphate
  modified_base 6: mod_base = OTHER; note = 2'-O-hexadecyl-guanosine-3'-phosphate
  modified_base 7: mod_base = OTHER; note = 2'-deoxy-2'-fluorouridine-3'-phosphate
  modified_base 8: mod_base = OTHER; note = 2'-O-methylguanosine-3'-phosphate
  modified_base 9: mod_base = OTHER; note = 2'-deoxy-2'-fluorocytidine-3'-phosphate
  modified_base 10: mod_base = OTHER; note = 2'-deoxy-2'-fluorouridine-3'-phosphate
  modified_base 11: mod_base = OTHER; note = 2'-deoxy-2'-fluorouridine-3'-phosphate
  modified_base 12: mod_base = OTHER; note = 2'-O-methyladenosine-3'-phosphate
  modified_base 13: mod_base = OTHER; note = 2'-O-methylcytidine-3'-phosphate
  modified_base 14: mod_base = OTHER; note = 2'-O-methylcytidine-3'-phosphate
  modified_base 15: mod_base = OTHER; note = 2'-O-methyladenosine-3'-phosphate
  modified_base 16: mod_base = OTHER; note = 2'-O-methylcytidine-3'-phosphate
  modified_base 17: mod_base = OTHER; note = 2'-O-methylcytidine-3'-phosphate
  modified_base 18: mod_base = OTHER; note = 2'-O-methyladenosine-3'-phosphate
  modified_base 19: mod_base = OTHER; note = 2'-O-methylcytidine-3'-phosphorothioate
  modified_base 20: mod_base = OTHER; note = 2'-O-methylguanosine-3'-phosphorothioate
  modified_base 21: mod_base = OTHER; note = 2'-O-methyladenosine
ccacagtgcttaccaccacga

SEQ ID NO: 4051 - RNA, 21 nt, synthetic construct
  source 1..21: mol_type = other RNA
  modified_base 1: mod_base = OTHER; note = 2'-O-methylguanosine-3'-phosphorothioate
  modified_base 2: mod_base = OTHER; note = 2'-O-methylcytidine-3'-phosphorothioate
  modified_base 3: mod_base = OTHER; note = 2'-O-methyluridine-3'-phosphate
  modified_base 4: mod_base = OTHER; note = 2'-O-methylcytidine-3'-phosphate
  modified_base 5: mod_base = OTHER; note = 2'-O-methyladenosine-3'-phosphate
  modified_base 6: mod_base = OTHER; note = 2'-O-hexadecyl-cytidine-3'-phosphate
  modified_base 7: mod_base = OTHER; note = 2'-deoxy-2'-fluoroadenosine-3'-phosphate
  modified_base 8: mod_base = OTHER; note = 2'-O-methylcytidine-3'-phosphate
  modified_base 9: mod_base = OTHER; note = 2'-deoxy-2'-fluorouridine-3'-phosphate
  modified_base 10: mod_base = OTHER; note = 2'-deoxy-2'-fluoroadenosine-3'-phosphate
  modified_base 11: mod_base = OTHER; note = 2'-deoxy-2'-fluorocytidine-3'-phosphate
  modified_base 12: mod_base = OTHER; note = 2'-O-methylcytidine-3'-phosphate
  modified_base 13: mod_base = OTHER; note = 2'-O-methyladenosine-3'-phosphate
  modified_base 14: mod_base = OTHER; note = 2'-O-methyladenosine-3'-phosphate
  modified_base 15: mod_base = OTHER; note = 2'-O-methyladenosine-3'-phosphate
  modified_base 16: mod_base = OTHER; note = 2'-O-methylguanosine-3'-phosphate
  modified_base 17: mod_base = OTHER; note = 2'-O-methyluridine-3'-phosphate
  modified_base 18: mod_base = OTHER; note = 2'-O-methylguanosine-3'-phosphate
  modified_base 19: mod_base = OTHER; note = 2'-O-methylcytidine-3'-phosphorothioate
  modified_base 20: mod_base = OTHER; note = 2'-O-methyluridine-3'-phosphorothioate
  modified_base 21: mod_base = OTHER; note = 2'-O-methyladenosine
gctcacactaccaaagtgcta

SEQ ID NO: 4052 - RNA, 21 nt, synthetic construct
  source 1..21: mol_type = other RNA
  modified_base 1: mod_base = OTHER; note = 2'-O-methyluridine-3'-phosphorothioate
  modified_base 2: mod_base = OTHER; note = 2'-O-methyladenosine-3'-phosphorothioate
  modified_base 3: mod_base = OTHER; note = 2'-O-methylcytidine-3'-phosphate
  modified_base 4: mod_base = OTHER; note = 2'-O-methylcytidine-3'-phosphate
  modified_base 5: mod_base = OTHER; note = 2'-O-methyladenosine-3'-phosphate
  modified_base 6: mod_base = OTHER; note = 2'-O-hexadecyl-cytidine-3'-phosphate
  modified_base 7: mod_base = OTHER; note = 2'-deoxy-2'-fluoroadenosine-3'-phosphate
  modified_base 8: mod_base = OTHER; note = 2'-O-methyladenosine-3'-phosphate
  modified_base 9: mod_base = OTHER; note = 2'-deoxy-2'-fluorocytidine-3'-phosphate
  modified_base 10: mod_base = OTHER; note = 2'-deoxy-2'-fluorocytidine-3'-phosphate
  modified_base 11: mod_base = OTHER; note = 2'-deoxy-2'-fluoroadenosine-3'-phosphate
  modified_base 12: mod_base = OTHER; note = 2'-O-methylcytidine-3'-phosphate
  modified_base 13: mod_base = OTHER; note = 2'-O-methylguanosine-3'-phosphate
  modified_base 14: mod_base = OTHER; note = 2'-O-methylguanosine-3'-phosphate
  modified_base 15: mod_base = OTHER; note = 2'-O-methylguanosine-3'-phosphate
  modified_base 16: mod_base = OTHER; note = 2'-O-methylcytidine-3'-phosphate
  modified_base 17: mod_base = OTHER; note = 2'-O-methyluridine-3'-phosphate
  modified_base 18: mod_base = OTHER; note = 2'-O-methyluridine-3'-phosphate
  modified_base 19: mod_base = OTHER; note = 2'-O-methylcytidine-3'-phosphorothioate
  modified_base 20: mod_base = OTHER; note = 2'-O-methyladenosine-3'-phosphorothioate
  modified_base 21: mod_base = OTHER; note = 2'-O-methyladenosine
taccacaaccacgggcttcaa

SEQ ID NO: 4053 - RNA, 21 nt, synthetic construct
  source 1..21: mol_type = other RNA
  modified_base 1: mod_base = OTHER; note = 2'-O-methylcytidine-3'-phosphorothioate
  modified_base 2: mod_base = OTHER; note = 2'-O-methyladenosine-3'-phosphorothioate
  modified_base 3: mod_base = OTHER; note = 2'-O-methylcytidine-3'-phosphate
  modified_base 4: mod_base = OTHER; note = 2'-O-methylguanosine-3'-phosphate
  modified_base 5: mod_base = OTHER; note = 2'-O-methylcytidine-3'-phosphate
  modified_base 6: mod_base = OTHER; note = 2'-O-hexadecyl-uridine-3'-phosphate
  modified_base 7: mod_base = OTHER; note = 2'-deoxy-2'-fluorouridine-3'-phosphate
  modified_base 8: mod_base = OTHER; note = 2'-O-methylcytidine-3'-phosphate
  modified_base 9: mod_base = OTHER; note = 2'-deoxy-2'-fluorocytidine-3'-phosphate
  modified_base 10: mod_base = OTHER; note = 2'-deoxy-2'-fluoroadenosine-3'-phosphate
  modified_base 11: mod_base = OTHER; note = 2'-deoxy-2'-fluoroguanosine-3'-phosphate
  modified_base 12: mod_base = OTHER; note = 2'-O-methyluridine-3'-phosphate
  modified_base 13: mod_base = OTHER; note = 2'-O-methylguanosine-3'-phosphate
  modified_base 14: mod_base = OTHER; note = 2'-O-methyluridine-3'-phosphate
  modified_base 15: mod_base = OTHER; note = 2'-O-methylguanosine-3'-phosphate
  modified_base 16: mod_base = OTHER; note = 2'-O-methylguanosine-3'-phosphate
  modified_base 17: mod_base = OTHER; note = 2'-O-methyladenosine-3'-phosphate
  modified_base 18: mod_base = OTHER; note = 2'-O-methyluridine-3'-phosphate
  modified_base 19: mod_base = OTHER; note = 2'-O-methylcytidine-3'-phosphorothioate
  modified_base 20: mod_base = OTHER; note = 2'-O-methyladenosine-3'-phosphorothioate
  modified_base 21: mod_base = OTHER; note = 2'-O-methyladenosine
cacgcttccagtgtggatcaa

SEQ ID NO: 4054 - RNA, 21 nt, synthetic construct
  source 1..21: mol_type = other RNA
  modified_base 1: mod_base = OTHER; note = 2'-O-methyladenosine-3'-phosphorothioate
  modified_base 2: mod_base = OTHER; note = 2'-O-methylcytidine-3'-phosphorothioate
  modified_base 3: mod_base = OTHER; note = 2'-O-methylcytidine-3'-phosphate
  modified_base 4: mod_base = OTHER; note = 2'-O-methylcytidine-3'-phosphate
  modified_base 5: mod_base = OTHER; note = 2'-O-methyladenosine-3'-phosphate
  modified_base 6: mod_base = OTHER; note = 2'-O-hexadecyl-cytidine-3'-phosphate
  modified_base 7: mod_base = OTHER; note = 2'-deoxy-2'-fluoroadenosine-3'-phosphate
  modified_base 8: mod_base = OTHER; note = 2'-O-methyladenosine-3'-phosphate
  modified_base 9: mod_base = OTHER; note = 2'-deoxy-2'-fluorocytidine-3'-phosphate
  modified_base 10: mod_base = OTHER; note = 2'-deoxy-2'-fluorocytidine-3'-phosphate
  modified_base 11: mod_base = OTHER; note = 2'-deoxy-2'-fluoroadenosine-3'-phosphate
  modified_base 12: mod_base = OTHER; note = 2'-O-methylguanosine-3'-phosphate
  modified_base 13: mod_base = OTHER; note = 2'-O-methyladenosine-3'-phosphate
  modified_base 14: mod_base = OTHER; note = 2'-O-methylguanosine-3'-phosphate
  modified_base 15: mod_base = OTHER; note = 2'-O-methylguanosine-3'-phosphate
  modified_base 16: mod_base = OTHER; note = 2'-O-methyluridine-3'-phosphate
  modified_base 17: mod_base = OTHER; note = 2'-O-methyluridine-3'-phosphate
  modified_base 18: mod_base = OTHER; note = 2'-O-methylcytidine-3'-phosphate
  modified_base 19: mod_base = OTHER; note = 2'-O-methylcytidine-3'-phosphorothioate
  modified_base 20: mod_base = OTHER; note = 2'-O-methyladenosine-3'-phosphorothioate
  modified_base 21: mod_base = OTHER; note = 2'-O-methyladenosine
acccacaaccagaggttccaa

SEQ ID NO: 4055 - RNA, 21 nt, synthetic construct
  source 1..21: mol_type = other RNA
  modified_base 1: mod_base = OTHER; note = 2'-O-methyluridine-3'-phosphorothioate
  modified_base 2: mod_base = OTHER; note = 2'-O-methylguanosine-3'-phosphorothioate
  modified_base 3: mod_base = OTHER; note = 2'-O-methyladenosine-3'-phosphate
  modified_base 4: mod_base = OTHER; note = 2'-O-methylcytidine-3'-phosphate
  modified_base 5: mod_base = OTHER; note = 2'-O-methylcytidine-3'-phosphate
  modified_base 6: mod_base = OTHER; note = 2'-O-hexadecyl-adenosine-3'-phosphate
  modified_base 7: mod_base = OTHER; note = 2'-deoxy-2'-fluorocytidine-3'-phosphate
  modified_base 8: mod_base = OTHER; note = 2'-O-methylcytidine-3'-phosphate
  modified_base 9: mod_base = OTHER; note = 2'-deoxy-2'-fluoroadenosine-3'-phosphate
  modified_base 10: mod_base = OTHER; note = 2'-deoxy-2'-fluorocytidine-3'-phosphate
  modified_base 11: mod_base = OTHER; note = 2'-deoxy-2'-fluorocytidine-3'-phosphate
  modified_base 12: mod_base = OTHER; note = 2'-O-methyladenosine-3'-phosphate
  modified_base 13: mod_base = OTHER; note = 2'-O-methylcytidine-3'-phosphate
  modified_base 14: mod_base = OTHER; note = 2'-O-methylcytidine-3'-phosphate
  modified_base 15: mod_base = OTHER; note = 2'-O-methyladenosine-3'-phosphate
  modified_base 16: mod_base = OTHER; note = 2'-O-methylcytidine-3'-phosphate
  modified_base 17: mod_base = OTHER; note = 2'-O-methyladenosine-3'-phosphate
  modified_base 18: mod_base = OTHER; note = 2'-O-methyladenosine-3'-phosphate
  modified_base 19: mod_base = OTHER; note = 2'-O-methylcytidine-3'-phosphorothioate
  modified_base 20: mod_base = OTHER; note = 2'-O-methyluridine-3'-phosphorothioate
  modified_base 21: mod_base = OTHER; note = 2'-O-methyladenosine
tgaccaccaccaccacaacta

SEQ ID NO: 4056 - RNA, 21 nt, synthetic construct
  source 1..21: mol_type = other RNA
  modified_base 1: mod_base = OTHER; note = 2'-O-methylcytidine-3'-phosphorothioate
  modified_base 2: mod_base = OTHER; note = 2'-O-methyluridine-3'-phosphorothioate
  modified_base 3: mod_base = OTHER; note = 2'-O-methylcytidine-3'-phosphate
  modified_base 4: mod_base = OTHER; note = 2'-O-methylcytidine-3'-phosphate
  modified_base 5: mod_base = OTHER; note = 2'-O-methyluridine-3'-phosphate
  modified_base 6: mod_base = OTHER; note = 2'-O-hexadecyl-cytidine-3'-phosphate
  modified_base 7: mod_base = OTHER; note = 2'-deoxy-2'-fluoroadenosine-3'-phosphate
  modified_base 8: mod_base = OTHER; note = 2'-O-methyladenosine-3'-phosphate
  modified_base 9: mod_base = OTHER; note = 2'-deoxy-2'-fluorocytidine-3'-phosphate
  modified_base 10: mod_base = OTHER; note = 2'-deoxy-2'-fluorouridine-3'-phosphate
  modified_base 11: mod_base = OTHER; note = 2'-deoxy-2'-fluorocytidine-3'-phosphate
  modified_base 12: mod_base = OTHER; note = 2'-O-methylcytidine-3'-phosphate
  modified_base 13: mod_base = OTHER; note = 2'-O-methyladenosine-3'-phosphate
  modified_base 14: mod_base = OTHER; note = 2'-O-methylguanosine-3'-phosphate
  modified_base 15: mod_base = OTHER; note = 2'-O-methylguanosine-3'-phosphate
  modified_base 16: mod_base = OTHER; note = 2'-O-methylguanosine-3'-phosphate
  modified_base 17: mod_base = OTHER; note = 2'-O-methyladenosine-3'-phosphate
  modified_base 18: mod_base = OTHER; note = 2'-O-methylcytidine-3'-phosphate
  modified_base 19: mod_base = OTHER; note = 2'-O-methyladenosine-3'-phosphorothioate
  modified_base 20: mod_base = OTHER; note = 2'-O-methyladenosine-3'-phosphorothioate
  modified_base 21: mod_base = OTHER; note = 2'-O-methyladenosine
ctcctcaactccagggacaaa

SEQ ID NO: 4057 - RNA, 21 nt, synthetic construct
  source 1..21: mol_type = other RNA
  modified_base 1: mod_base = OTHER; note = 2'-O-methylcytidine-3'-phosphorothioate
  modified_base 2: mod_base = OTHER; note = 2'-O-methyladenosine-3'-phosphorothioate
  modified_base 3: mod_base = OTHER; note = 2'-O-methylguanosine-3'-phosphate
  modified_base 4: mod_base = OTHER; note = 2'-O-methylcytidine-3'-phosphate
  modified_base 5: mod_base = OTHER; note = 2'-O-methyladenosine-3'-phosphate
  modified_base 6: mod_base = OTHER; note = 2'-O-hexadecyl-guanosine-3'-phosphate
  modified_base 7: mod_base = OTHER; note = 2'-deoxy-2'-fluorocytidine-3'-phosphate
  modified_base 8: mod_base = OTHER; note = 2'-O-methyladenosine-3'-phosphate
  modified_base 9: mod_base = OTHER; note = 2'-deoxy-2'-fluorocytidine-3'-phosphate
  modified_base 10: mod_base = OTHER; note = 2'-deoxy-2'-fluoroadenosine-3'-phosphate
  modified_base 11: mod_base = OTHER; note = 2'-deoxy-2'-fluoroguanosine-3'-phosphate
  modified_base 12: mod_base = OTHER; note = 2'-O-methyluridine-3'-phosphate
  modified_base 13: mod_base = OTHER; note = 2'-O-methylguanosine-3'-phosphate
  modified_base 14: mod_base = OTHER; note = 2'-O-methyladenosine-3'-phosphate
  modified_base 15: mod_base = OTHER; note = 2'-O-methylcytidine-3'-phosphate
  modified_base 16: mod_base = OTHER; note = 2'-O-methyluridine-3'-phosphate
  modified_base 17: mod_base = OTHER; note = 2'-O-methylcytidine-3'-phosphate
  modified_base 18: mod_base = OTHER; note = 2'-O-methylcytidine-3'-phosphate
  modified_base 19: mod_base = OTHER; note = 2'-O-methylcytidine-3'-phosphorothioate
  modified_base 20: mod_base = OTHER; note = 2'-O-methyluridine-3'-phosphorothioate
  modified_base 21: mod_base = OTHER; note = 2'-O-methyladenosine
cagcagcacagtgactcccta

SEQ ID NO: 4058 - RNA, 21 nt, synthetic construct
  source 1..21: mol_type = other RNA
  modified_base 1: mod_base = OTHER; note = 2'-O-methylcytidine-3'-phosphorothioate
  modified_base 2: mod_base = OTHER; note = 2'-O-methyladenosine-3'-phosphorothioate
  modified_base 3: mod_base = OTHER; note = 2'-O-methylcytidine-3'-phosphate
  modified_base 4: mod_base = OTHER; note = 2'-O-methyladenosine-3'-phosphate
  modified_base 5: mod_base = OTHER; note = 2'-O-methylcytidine-3'-phosphate
  modified_base 6: mod_base = OTHER; note = 2'-O-hexadecyl-adenosine-3'-phosphate
  modified_base 7: mod_base = OTHER; note = 2'-deoxy-2'-fluorocytidine-3'-phosphate
  modified_base 8: mod_base = OTHER; note = 2'-O-methylguanosine-3'-phosphate
  modified_base 9: mod_base = OTHER; note = 2'-deoxy-2'-fluoroguanosine-3'-phosphate
  modified_base 10: mod_base = OTHER; note = 2'-deoxy-2'-fluoroguanosine-3'-phosphate
  modified_base 11: mod_base = OTHER; note = 2'-deoxy-2'-fluorocytidine-3'-phosphate
  modified_base 12: mod_base = OTHER; note = 2'-O-methylguanosine-3'-phosphate
  modified_base 13: mod_base = OTHER; note = 2'-O-methyladenosine-3'-phosphate
  modified_base 14: mod_base = OTHER; note = 2'-O-methyluridine-3'-phosphate
  modified_base 15: mod_base = OTHER; note = 2'-O-methylcytidine-3'-phosphate
  modified_base 16: mod_base = OTHER; note = 2'-O-methylcytidine-3'-phosphate
  modified_base 17: mod_base = OTHER; note = 2'-O-methylcytidine-3'-phosphate
  modified_base 18: mod_base = OTHER; note = 2'-O-methyluridine-3'-phosphate
  modified_base 19: mod_base = OTHER; note = 2'-O-methylguanosine-3'-phosphorothioate
  modified_base 20: mod_base = OTHER; note = 2'-O-methyluridine-3'-phosphorothioate
  modified_base 21: mod_base = OTHER; note = 2'-O-methyladenosine
cacacacgggcgatccctgta

SEQ ID NO: 4059 - RNA, 21 nt, synthetic construct
  source 1..21: mol_type = other RNA
  modified_base 1: mod_base = OTHER; note = 2'-O-methylcytidine-3'-phosphorothioate
  modified_base 2: mod_base = OTHER; note = 2'-O-methylcytidine-3'-phosphorothioate
  modified_base 3: mod_base = OTHER; note = 2'-O-methyladenosine-3'-phosphate
  modified_base 4: mod_base = OTHER; note = 2'-O-methylcytidine-3'-phosphate
  modified_base 5: mod_base = OTHER; note = 2'-O-methylcytidine-3'-phosphate
  modified_base 6: mod_base = OTHER; note = 2'-O-hexadecyl-cytidine-3'-phosphate
  modified_base 7: mod_base = OTHER; note = 2'-deoxy-2'-fluoroadenosine-3'-phosphate
  modified_base 8: mod_base = OTHER; note = 2'-O-methylguanosine-3'-phosphate
  modified_base 9: mod_base = OTHER; note = 2'-deoxy-2'-fluorocytidine-3'-phosphate
  modified_base 10: mod_base = OTHER; note = 2'-deoxy-2'-fluoroadenosine-3'-phosphate
  modified_base 11: mod_base = OTHER; note = 2'-deoxy-2'-fluorocytidine-3'-phosphate
  modified_base 12: mod_base = OTHER; note = 2'-O-methyluridine-3'-phosphate
  modified_base 13: mod_base = OTHER; note = 2'-O-methylcytidine-3'-phosphate
  modified_base 14: mod_base = OTHER; note = 2'-O-methylguanosine-3'-phosphate
  modified_base 15: mod_base = OTHER; note = 2'-O-methyladenosine-3'-phosphate
  modified_base 16: mod_base = OTHER; note = 2'-O-methylcytidine-3'-phosphate
  modified_base 17: mod_base = OTHER; note = 2'-O-methyluridine-3'-phosphate
  modified_base 18: mod_base = OTHER; note = 2'-O-methylcytidine-3'-phosphate
  modified_base 19: mod_base = OTHER; note = 2'-O-methylcytidine-3'-phosphorothioate
  modified_base 20: mod_base = OTHER; note = 2'-O-methyladenosine-3'-phosphorothioate
  modified_base 21: mod_base = OTHER; note = 2'-O-methyladenosine
ccacccagcactcgactccaa

SEQ ID NO: 4060 - RNA, 21 nt, synthetic construct
  source 1..21: mol_type = other RNA
  modified_base 1: mod_base = OTHER; note = 2'-O-methylcytidine-3'-phosphorothioate
  modified_base 2: mod_base = OTHER; note = 2'-O-methyladenosine-3'-phosphorothioate
  modified_base 3: mod_base = OTHER; note = 2'-O-methylguanosine-3'-phosphate
  modified_base 4: mod_base = OTHER; note = 2'-O-methylcytidine-3'-phosphate
  modified_base 5: mod_base = OTHER; note = 2'-O-methylcytidine-3'-phosphate
  modified_base 6: mod_base = OTHER; note = 2'-O-hexadecyl-cytidine-3'-phosphate
  modified_base 7: mod_base = OTHER; note = 2'-deoxy-2'-fluorouridine-3'-phosphate
  modified_base 8: mod_base = OTHER; note = 2'-O-methylcytidine-3'-phosphate
  modified_base 9: mod_base = OTHER; note = 2'-deoxy-2'-fluoroadenosine-3'-phosphate
  modified_base 10: mod_base = OTHER; note = 2'-deoxy-2'-fluorocytidine-3'-phosphate
  modified_base 11: mod_base = OTHER; note = 2'-deoxy-2'-fluorocytidine-3'-phosphate
  modified_base 12: mod_base = OTHER; note = 2'-O-methylcytidine-3'-phosphate
  modified_base 13: mod_base = OTHER; note = 2'-O-methyluridine-3'-phosphate
  modified_base 14: mod_base = OTHER; note = 2'-O-methyladenosine-3'-phosphate
  modified_base 15: mod_base = OTHER; note = 2'-O-methylguanosine-3'-phosphate
  modified_base 16: mod_base = OTHER; note = 2'-O-methylcytidine-3'-phosphate
  modified_base 17: mod_base = OTHER; note = 2'-O-methyladenosine-3'-phosphate
  modified_base 18: mod_base = OTHER; note = 2'-O-methylguanosine-3'-phosphate
  modified_base 19: mod_base = OTHER; note = 2'-O-methylcytidine-3'-phosphorothioate
  modified_base 20: mod_base = OTHER; note = 2'-O-methyladenosine-3'-phosphorothioate
  modified_base 21: mod_base = OTHER; note = 2'-O-methyladenosine
cagccctcaccctagcagcaa

SEQ ID NO: 4061 - RNA, 21 nt, synthetic construct
  source 1..21: mol_type = other RNA
  modified_base 1: mod_base = OTHER; note = 2'-O-methylcytidine-3'-phosphorothioate
  modified_base 2: mod_base = OTHER; note = 2'-O-methyluridine-3'-phosphorothioate
  modified_base 3: mod_base = OTHER; note = 2'-O-methylguanosine-3'-phosphate
  modified_base 4: mod_base = OTHER; note = 2'-O-methylguanosine-3'-phosphate
  modified_base 5: mod_base = OTHER; note = 2'-O-methyladenosine-3'-phosphate
  modified_base 6: mod_base = OTHER; note = 2'-O-hexadecyl-uridine-3'-phosphate
  modified_base 7: mod_base = OTHER; note = 2'-deoxy-2'-fluorocytidine-3'-phosphate
  modified_base 8: mod_base = OTHER; note = 2'-O-methylcytidine-3'-phosphate
  modified_base 9: mod_base = OTHER; note = 2'-deoxy-2'-fluorouridine-3'-phosphate
  modified_base 10: mod_base = OTHER; note = 2'-deoxy-2'-fluorocytidine-3'-phosphate
  modified_base 11: mod_base = OTHER; note = 2'-deoxy-2'-fluoroadenosine-3'-phosphate
  modified_base 12: mod_base = OTHER; note = 2'-O-methylcytidine-3'-phosphate
  modified_base 13: mod_base = OTHER; note = 2'-O-methyladenosine-3'-phosphate
  modified_base 14: mod_base = OTHER; note = 2'-O-methylguanosine-3'-phosphate
  modified_base 15: mod_base = OTHER; note = 2'-O-methyladenosine-3'-phosphate
  modified_base 16: mod_base = OTHER; note = 2'-O-methylguanosine-3'-phosphate
  modified_base 17: mod_base = OTHER; note = 2'-O-methylcytidine-3'-phosphate
  modified_base 18: mod_base = OTHER; note = 2'-O-methyladenosine-3'-phosphate
  modified_base 19: mod_base = OTHER; note = 2'-O-methylguanosine-3'-phosphorothioate
  modified_base 20: mod_base = OTHER; note = 2'-O-methyladenosine-3'-phosphorothioate
  modified_base 21: mod_base = OTHER; note = 2'-O-methyladenosine
ctggatcctcacagagcagaa

SEQ ID NO: 4062 - RNA, 21 nt, synthetic construct
  source 1..21: mol_type = other RNA
  modified_base 1: mod_base = OTHER; note = 2'-O-methylcytidine-3'-phosphorothioate
  modified_base 2: mod_base = OTHER; note = 2'-O-methyladenosine-3'-phosphorothioate
  modified_base 3: mod_base = OTHER; note = 2'-O-methylguanosine-3'-phosphate
  modified_base 4: mod_base = OTHER; note = 2'-O-methylcytidine-3'-phosphate
  modified_base 5: mod_base = OTHER; note = 2'-O-methylcytidine-3'-phosphate
  modified_base 6: mod_base = OTHER; note = 2'-O-hexadecyl-adenosine-3'-phosphate
  modified_base 7: mod_base = OTHER; note = 2'-deoxy-2'-fluorocytidine-3'-phosphate
  modified_base 8: mod_base = OTHER; note = 2'-O-methyluridine-3'-phosphate
  modified_base 9: mod_base = OTHER; note = 2'-deoxy-2'-fluoroadenosine-3'-phosphate
  modified_base 10: mod_base = OTHER; note = 2'-deoxy-2'-fluorocytidine-3'-phosphate
  modified_base 11: mod_base = OTHER; note = 2'-deoxy-2'-fluoroguanosine-3'-phosphate
  modified_base 12: mod_base = OTHER; note = 2'-O-methyladenosine-3'-phosphate
  modified_base 13: mod_base = OTHER; note = 2'-O-methylcytidine-3'-phosphate
  modified_base 14: mod_base = OTHER; note = 2'-O-methylcytidine-3'-phosphate
  modified_base 15: mod_base = OTHER; note = 2'-O-methylguanosine-3'-phosphate
  modified_base 16: mod_base = OTHER; note = 2'-O-methylcytidine-3'-phosphate
  modified_base 17: mod_base = OTHER; note = 2'-O-methyladenosine-3'-phosphate
  modified_base 18: mod_base = OTHER; note = 2'-O-methyladenosine-3'-phosphate
  modified_base 19: mod_base = OTHER; note = 2'-O-methylcytidine-3'-phosphorothioate
  modified_base 20: mod_base = OTHER; note = 2'-O-methylcytidine-3'-phosphorothioate
  modified_base 21: mod_base = OTHER; note = 2'-O-methyladenosine
cagccactacgaccgcaacca

SEQ ID NO: 4063 - RNA, 21 nt, synthetic construct
  source 1..21: mol_type = other RNA
  modified_base 1: mod_base = OTHER; note = 2'-O-methyluridine-3'-phosphorothioate
  modified_base 2: mod_base = OTHER; note = 2'-O-methylcytidine-3'-phosphorothioate
  modified_base 3: mod_base = OTHER; note = 2'-O-methylcytidine-3'-phosphate
  modified_base 4: mod_base = OTHER; note = 2'-O-methylcytidine-3'-phosphate
  modified_base 5: mod_base = OTHER; note = 2'-O-methyladenosine-3'-phosphate
  modified_base 6: mod_base = OTHER; note = 2'-O-hexadecyl-adenosine-3'-phosphate
  modified_base 7: mod_base = OTHER; note = 2'-deoxy-2'-fluoroadenosine-3'-phosphate
  modified_base 8: mod_base = OTHER; note = 2'-O-methylguanosine-3'-phosphate
  modified_base 9: mod_base = OTHER; note = 2'-deoxy-2'-fluorouridine-3'-phosphate
  modified_base 10: mod_base = OTHER; note = 2'-deoxy-2'-fluoroguanosine-3'-phosphate
  modified_base 11: mod_base = OTHER; note = 2'-deoxy-2'-fluorocytidine-3'-phosphate
  modified_base 12: mod_base = OTHER; note = 2'-O-methyluridine-3'-phosphate
  modified_base 13: mod_base = OTHER; note = 2'-O-methylguanosine-3'-phosphate
  modified_base 14: mod_base = OTHER; note = 2'-O-methyladenosine-3'-phosphate
  modified_base 15: mod_base = OTHER; note = 2'-O-methylcytidine-3'-phosphate
  modified_base 16: mod_base = OTHER; note = 2'-O-methylcytidine-3'-phosphate
  modified_base 17: mod_base = OTHER; note = 2'-O-methyladenosine-3'-phosphate
  modified_base 18: mod_base = OTHER; note = 2'-O-methylguanosine-3'-phosphate
  modified_base 19: mod_base = OTHER; note = 2'-O-methylcytidine-3'-phosphorothioate
  modified_base 20: mod_base = OTHER; note = 2'-O-methyladenosine-3'-phosphorothioate
  modified_base 21: mod_base = OTHER; note = 2'-O-methyladenosine
tcccaaagtgctgaccagcaa

SEQ ID NO: 4064 - RNA, 21 nt, synthetic construct
  source 1..21: mol_type = other RNA
  modified_base 1: mod_base = OTHER; note = 2'-O-methylcytidine-3'-phosphorothioate
  modified_base 2: mod_base = OTHER; note = 2'-O-methyladenosine-3'-phosphorothioate
  modified_base 3: mod_base = OTHER; note = 2'-O-methylguanosine-3'-phosphate
  modified_base 4: mod_base = OTHER; note = 2'-O-methyluridine-3'-phosphate
  modified_base 5: mod_base = OTHER; note = 2'-O-methyluridine-3'-phosphate
  modified_base 6: mod_base = OTHER; note = 2'-O-hexadecyl-cytidine-3'-phosphate
  modified_base 7: mod_base = OTHER; note = 2'-deoxy-2'-fluorocytidine-3'-phosphate
  modified_base 8: mod_base = OTHER; note = 2'-O-methyladenosine-3'-phosphate
  modified_base 9: mod_base = OTHER; note = 2'-deoxy-2'-fluoroadenosine-3'-phosphate
  modified_base 10: mod_base = OTHER; note = 2'-deoxy-2'-fluoroadenosine-3'-phosphate
  modified_base 11: mod_base = OTHER; note = 2'-deoxy-2'-fluoroguanosine-3'-phosphate
  modified_base 12: mod_base = OTHER; note = 2'-O-methylcytidine-3'-phosphate
  modified_base 13: mod_base = OTHER; note = 2'-O-methylcytidine-3'-phosphate
  modified_base 14: mod_base = OTHER; note = 2'-O-methyladenosine-3'-phosphate
  modified_base 15: mod_base = OTHER; note = 2'-O-methylcytidine-3'-phosphate
  modified_base 16: mod_base = OTHER; note = 2'-O-methyluridine-3'-phosphate
  modified_base 17: mod_base = OTHER; note = 2'-O-methyluridine-3'-phosphate
  modified_base 18: mod_base = OTHER; note = 2'-O-methylcytidine-3'-phosphate
  modified_base 19: mod_base = OTHER; note = 2'-O-methylcytidine-3'-phosphorothioate
  modified_base 20: mod_base = OTHER; note = 2'-O-methyluridine-3'-phosphorothioate
  modified_base 21: mod_base = OTHER; note = 2'-O-methyladenosine
cagttccaaagccacttccta

SEQ ID NO: 4065 - RNA, 21 nt, synthetic construct
  source 1..21: mol_type = other RNA
  modified_base 1: mod_base = OTHER; note = 2'-O-methylcytidine-3'-phosphorothioate
  modified_base 2: mod_base = OTHER; note = 2'-O-methyladenosine-3'-phosphorothioate
  modified_base 3: mod_base = OTHER; note = 2'-O-methyladenosine-3'-phosphate
  modified_base 4: mod_base = OTHER; note = 2'-O-methylguanosine-3'-phosphate
  modified_base 5: mod_base = OTHER; note = 2'-O-methylguanosine-3'-phosphate
  modified_base 6: mod_base = OTHER; note = 2'-O-hexadecyl-adenosine-3'-phosphate
  modified_base 7: mod_base = OTHER; note = 2'-deoxy-2'-fluorocytidine-3'-phosphate
  modified_base 8: mod_base = OTHER; note = 2'-O-methyluridine-3'-phosphate
  modified_base 9: mod_base = OTHER; note = 2'-deoxy-2'-fluoroguanosine-3'-phosphate
  modified_base 10: mod_base = OTHER; note = 2'-deoxy-2'-fluorocytidine-3'-phosphate
  modified_base 11: mod_base = OTHER; note = 2'-deoxy-2'-fluoroadenosine-3'-phosphate
  modified_base 12: mod_base = OTHER; note = 2'-O-methyladenosine-3'-phosphate
  modified_base 13: mod_base = OTHER; note = 2'-O-methylcytidine-3'-phosphate
  modified_base 14: mod_base = OTHER; note = 2'-O-methylcytidine-3'-phosphate
  modified_base 15: mod_base = OTHER; note = 2'-O-methyladenosine-3'-phosphate
  modified_base 16: mod_base = OTHER; note = 2'-O-methylcytidine-3'-phosphate
  modified_base 17: mod_base = OTHER; note = 2'-O-methylcytidine-3'-phosphate
  modified_base 18: mod_base = OTHER; note = 2'-O-methylcytidine-3'-phosphate
  modified_base 19: mod_base = OTHER; note = 2'-O-methyluridine-3'-phosphorothioate
  modified_base 20: mod_base = OTHER; note = 2'-O-methyluridine-3'-phosphorothioate
  modified_base 21: mod_base = OTHER; note = 2'-O-methyladenosine
caaggactgcaaccaccctta

SEQ ID NO: 4066 - RNA, 21 nt, synthetic construct
  source 1..21: mol_type = other RNA
  modified_base 1: mod_base = OTHER; note = 2'-O-methylguanosine-3'-phosphorothioate
  modified_base 2: mod_base = OTHER; note = 2'-O-methyluridine-3'-phosphorothioate
  modified_base 3: mod_base = OTHER; note = 2'-O-methylguanosine-3'-phosphate
  modified_base 4: mod_base = OTHER; note = 2'-O-methylcytidine-3'-phosphate
  modified_base 5: mod_base = OTHER; note = 2'-O-methyluridine-3'-phosphate
  modified_base 6: mod_base = OTHER; note = 2'-O-hexadecyl-guanosine-3'-phosphate
  modified_base 7: mod_base = OTHER; note = 2'-deoxy-2'-fluoroadenosine-3'-phosphate
  modified_base 8: mod_base = OTHER; note = 2'-O-methylcytidine-3'-phosphate
  modified_base 9: mod_base = OTHER; note = 2'-deoxy-2'-fluoroadenosine-3'-phosphate
  modified_base 10: mod_base = OTHER; note = 2'-deoxy-2'-fluoroadenosine-3'-phosphate
  modified_base 11: mod_base = OTHER; note = 2'-deoxy-2'-fluoroguanosine-3'-phosphate
  modified_base 12: mod_base = OTHER; note = 2'-O-methylcytidine-3'-phosphate
  modified_base 13: mod_base = OTHER; note = 2'-O-methyladenosine-3'-phosphate
  modified_base 14: mod_base = OTHER; note = 2'-O-methylcytidine-3'-phosphate
  modified_base 15: mod_base = OTHER; note = 2'-O-methyladenosine-3'-phosphate
  modified_base 16: mod_base = OTHER; note = 2'-O-methylguanosine-3'-phosphate
  modified_base 17: mod_base = OTHER; note = 2'-O-methylcytidine-3'-phosphate
  modified_base 18: mod_base = OTHER; note = 2'-O-methylcytidine-3'-phosphate
  modified_base 19: mod_base = OTHER; note = 2'-O-methyladenosine-3'-phosphorothioate
  modified_base 20: mod_base = OTHER; note = 2'-O-methylcytidine-3'-phosphorothioate
  modified_base 21: mod_base = OTHER; note = 2'-O-methyladenosine
gtgctgacaagcacagccaca

SEQ ID NO: 4067 - RNA, 21 nt, synthetic construct
  source 1..21: mol_type = other RNA
  modified_base 1: mod_base = OTHER; note = 2'-O-methylcytidine-3'-phosphorothioate
  modified_base 2: mod_base = OTHER; note = 2'-O-methyladenosine-3'-phosphorothioate
  modified_base 3: mod_base = OTHER; note = 2'-O-methylcytidine-3'-phosphate
  modified_base 4: mod_base = OTHER; note = 2'-O-methyladenosine-3'-phosphate
  modified_base 5: mod_base = OTHER; note = 2'-O-methylguanosine-3'-phosphate
  modified_base 6: mod_base = OTHER; note = 2'-O-hexadecyl-cytidine-3'-phosphate
  modified_base 7: mod_base = OTHER; note = 2'-deoxy-2'-fluorouridine-3'-phosphate
  modified_base 8: mod_base = OTHER; note = 2'-O-methyladenosine-3'-phosphate
  modified_base 9: mod_base = OTHER; note = 2'-deoxy-2'-fluorocytidine-3'-phosphate
  modified_base 10: mod_base = OTHER; note = 2'-deoxy-2'-fluorocytidine-3'-phosphate
  modified_base 11: mod_base = OTHER; note = 2'-deoxy-2'-fluoroadenosine-3'-phosphate
  modified_base 12: mod_base = OTHER; note = 2'-O-methylguanosine-3'-phosphate
  modified_base 13: mod_base = OTHER; note = 2'-O-methylcytidine-3'-phosphate
  modified_base 14: mod_base = OTHER; note = 2'-O-methyluridine-3'-phosphate
  modified_base 15: mod_base = OTHER; note = 2'-O-methyluridine-3'-phosphate
  modified_base 16: mod_base = OTHER; note = 2'-O-methyluridine-3'-phosphate
  modified_base 17: mod_base = OTHER; note = 2'-O-methyladenosine-3'-phosphate
  modified_base 18: mod_base = OTHER; note = 2'-O-methylcytidine-3'-phosphate
  modified_base 19: mod_base = OTHER; note = 2'-O-methyladenosine-3'-phosphorothioate
  modified_base 20: mod_base = OTHER; note = 2'-O-methylcytidine-3'-phosphorothioate
  modified_base 21: mod_base = OTHER; note = 2'-O-methyladenosine
cacagctaccagctttacaca

SEQ ID NO: 4068 - RNA, 21 nt, synthetic construct
  source 1..21: mol_type = other RNA
  modified_base 1: mod_base = OTHER; note = 2'-O-methylcytidine-3'-phosphorothioate
  modified_base 2: mod_base = OTHER; note = 2'-O-methyluridine-3'-phosphorothioate
  modified_base 3: mod_base = OTHER; note = 2'-O-methylcytidine-3'-phosphate
  modified_base 4: mod_base = OTHER; note = 2'-O-methylcytidine-3'-phosphate
  modified_base 5: mod_base = OTHER; note = 2'-O-methyluridine-3'-phosphate
  modified_base 6: mod_base = OTHER; note = 2'-O-hexadecyl-uridine-3'-phosphate
  modified_base 7: mod_base = OTHER; note = 2'-deoxy-2'-fluorocytidine-3'-phosphate
  modified_base 8: mod_base = OTHER; note = 2'-O-methyladenosine-3'-phosphate
  modified_base 9: mod_base = OTHER; note = 2'-deoxy-2'-fluorocytidine-3'-phosphate
  modified_base 10: mod_base = OTHER; note = 2'-deoxy-2'-fluorocytidine-3'-phosphate
  modified_base 11: mod_base = OTHER; note = 2'-deoxy-2'-fluorocytidine-3'-phosphate
  modified_base 12: mod_base = OTHER; note = 2'-O-methyluridine-3'-phosphate
  modified_base 13: mod_base = OTHER; note = 2'-O-methyluridine-3'-phosphate
  modified_base 14: mod_base = OTHER; note = 2'-O-methylguanosine-3'-phosphate
  modified_base 15: mod_base = OTHER; note = 2'-O-methylguanosine-3'-phosphate
  modified_base 16: mod_base = OTHER; note = 2'-O-methylguanosine-3'-phosphate
  modified_base 17: mod_base = OTHER; note = 2'-O-methyladenosine-3'-phosphate
  modified_base 18: mod_base = OTHER; note = 2'-O-methylcytidine-3'-phosphate
  modified_base 19: mod_base = OTHER; note = 2'-O-methylcytidine-3'-phosphorothioate
  modified_base 20: mod_base = OTHER; note = 2'-O-methyladenosine-3'-phosphorothioate
  modified_base 21: mod_base = OTHER; note = 2'-O-methyladenosine
ctccttcacccttgggaccaa

SEQ ID NO: 4069 - RNA, 21 nt, synthetic construct
  source 1..21: mol_type = other RNA
  modified_base 1: mod_base = OTHER; note = 2'-O-methylcytidine-3'-phosphorothioate
  modified_base 2: mod_base = OTHER; note = 2'-O-methylcytidine-3'-phosphorothioate
  modified_base 3: mod_base = OTHER; note = 2'-O-methylcytidine-3'-phosphate
  modified_base 4: mod_base = OTHER; note = 2'-O-methyladenosine-3'-phosphate
  modified_base 5: mod_base = OTHER; note = 2'-O-methylguanosine-3'-phosphate
  modified_base 6: mod_base = OTHER; note = 2'-O-hexadecyl-adenosine-3'-phosphate
  modified_base 7: mod_base = OTHER; note = 2'-deoxy-2'-fluoroadenosine-3'-phosphate
  modified_base 8: mod_base = OTHER; note = 2'-O-methylcytidine-3'-phosphate
  modified_base 9: mod_base = OTHER; note = 2'-deoxy-2'-fluoroadenosine-3'-phosphate
  modified_base 10: mod_base = OTHER; note = 2'-deoxy-2'-fluoroguanosine-3'-phosphate
  modified_base 11: mod_base = OTHER; note = 2'-deoxy-2'-fluoroadenosine-3'-phosphate
  modified_base 12: mod_base = OTHER; note = 2'-O-methylcytidine-3'-phosphate
  modified_base 13: mod_base = OTHER; note = 2'-O-methylcytidine-3'-phosphate
  modified_base 14: mod_base = OTHER; note = 2'-O-methyladenosine-3'-phosphate
  modified_base 15: mod_base = OTHER; note = 2'-O-methylcytidine-3'-phosphate
  modified_base 16: mod_base = OTHER; note = 2'-O-methylcytidine-3'-phosphate
  modified_base 17: mod_base = OTHER; note = 2'-O-methyladenosine-3'-phosphate
  modified_base 18: mod_base = OTHER; note = 2'-O-methylcytidine-3'-phosphate
  modified_base 19: mod_base = OTHER; note = 2'-O-methyladenosine-3'-phosphorothioate
  modified_base 20: mod_base = OTHER; note = 2'-O-methylcytidine-3'-phosphorothioate
  modified_base 21: mod_base = OTHER; note = 2'-O-methyladenosine
cccagaacagaccaccacaca

SEQ ID NO: 4070 - RNA, 21 nt, synthetic construct
  source 1..21: mol_type = other RNA
  modified_base 1: mod_base = OTHER; note = 2'-O-methylcytidine-3'-phosphorothioate
  modified_base 2: mod_base = OTHER; note = 2'-O-methyladenosine-3'-phosphorothioate
  modified_base 3: mod_base = OTHER; note = 2'-O-methylcytidine-3'-phosphate
  modified_base 4: mod_base = OTHER; note = 2'-O-methylcytidine-3'-phosphate
  modified_base 5: mod_base = OTHER; note = 2'-O-methyladenosine-3'-phosphate
  modified_base 6: mod_base = OTHER; note = 2'-O-hexadecyl-uridine-3'-phosphate
  modified_base 7: mod_base = OTHER; note = 2'-deoxy-2'-fluoroguanosine-3'-phosphate
  modified_base 8: mod_base = OTHER; note = 2'-O-methyluridine-3'-phosphate
  modified_base 9: mod_base = OTHER; note = 2'-deoxy-2'-fluorocytidine-3'-phosphate
  modified_base 10: mod_base = OTHER; note = 2'-deoxy-2'-fluorocytidine-3'-phosphate
  modified_base 11: mod_base = OTHER; note = 2'-deoxy-2'-fluoroadenosine-3'-phosphate
  modified_base 12: mod_base = OTHER; note = 2'-O-methylcytidine-3'-phosphate
  modified_base 13: mod_base = OTHER; note = 2'-O-methyladenosine-3'-phosphate
  modified_base 14: mod_base = OTHER; note = 2'-O-methyladenosine-3'-phosphate
  modified_base 15: mod_base = OTHER; note = 2'-O-methyluridine-3'-phosphate
  modified_base 16: mod_base = OTHER; note = 2'-O-methylcytidine-3'-phosphate
  modified_base 17: mod_base = OTHER; note = 2'-O-methylcytidine-3'-phosphate
  modified_base 18: mod_base = OTHER; note = 2'-O-methyladenosine-3'-phosphate
  modified_base 19: mod_base = OTHER; note = 2'-O-methylcytidine-3'-phosphorothioate
  modified_base 20: mod_base = OTHER; note = 2'-O-methylcytidine-3'-phosphorothioate
  modified_base 21: mod_base = OTHER; note = 2'-O-methyladenosine
caccatgtccacaatccacca

SEQ ID NO: 4071 - RNA, 21 nt, synthetic construct
  source 1..21: mol_type = other RNA
  modified_base 1: mod_base = OTHER; note = 2'-O-methylcytidine-3'-phosphorothioate
  modified_base 2: mod_base = OTHER; note = 2'-O-methyluridine-3'-phosphorothioate
  modified_base 3: mod_base = OTHER; note = 2'-O-methylcytidine-3'-phosphate
  modified_base 4: mod_base = OTHER; note = 2'-O-methylcytidine-3'-phosphate
  modified_base 5: mod_base = OTHER; note = 2'-O-methyladenosine-3'-phosphate
  modified_base 6: mod_base = OTHER; note = 2'-O-hexadecyl-cytidine-3'-phosphate
  modified_base 7: mod_base = OTHER; note = 2'-deoxy-2'-fluoroadenosine-3'-phosphate
  modified_base 8: mod_base = OTHER; note = 2'-O-methylguanosine-3'-phosphate
  modified_base 9: mod_base = OTHER; note = 2'-deoxy-2'-fluorouridine-3'-phosphate
  modified_base 10: mod_base = OTHER; note = 2'-deoxy-2'-fluoroguanosine-3'-phosphate
  modified_base 11: mod_base = OTHER; note = 2'-deoxy-2'-fluorocytidine-3'-phosphate
  modified_base 12: mod_base = OTHER; note = 2'-O-methyluridine-3'-phosphate
  modified_base 13: mod_base = OTHER; note = 2'-O-methylguanosine-3'-phosphate
  modified_base 14: mod_base = OTHER; note = 2'-O-methyladenosine-3'-phosphate
  modified_base 15: mod_base = OTHER; note = 2'-O-methylcytidine-3'-phosphate
  modified_base 16: mod_base = OTHER; note = 2'-O-methylcytidine-3'-phosphate
  modified_base 17: mod_base = OTHER; note = 2'-O-methyladenosine-3'-phosphate
  modified_base 18: mod_base = OTHER; note = 2'-O-methylcytidine-3'-phosphate
  modified_base 19: mod_base = OTHER; note = 2'-O-methylguanosine-3'-phosphorothioate
  modified_base 20: mod_base = OTHER; note = 2'-O-methyladenosine-3'-phosphorothioate
  modified_base 21: mod_base = OTHER; note = 2'-O-methyladenosine
ctccacagtgctgaccacgaa

SEQ ID NO: 4072 - RNA, 21 nt, synthetic construct
  source 1..21: mol_type = other RNA
  modified_base 1: mod_base = OTHER; note = 2'-O-methylguanosine-3'-phosphorothioate
  modified_base 2: mod_base = OTHER; note = 2'-O-methylguanosine-3'-phosphorothioate
  modified_base 3: mod_base = OTHER; note = 2'-O-methylcytidine-3'-phosphate
  modified_base 4: mod_base = OTHER; note = 2'-O-methylcytidine-3'-phosphate
  modified_base 5: mod_base = OTHER; note = 2'-O-methyladenosine-3'-phosphate
  modified_base 6: mod_base = OTHER; note = 2'-O-hexadecyl-cytidine-3'-phosphate
  modified_base 7: mod_base = OTHER; note = 2'-deoxy-2'-fluorocytidine-3'-phosphate
  modified_base 8: mod_base = OTHER; note = 2'-O-methyladenosine-3'-phosphate
  modified_base 9: mod_base = OTHER; note = 2'-deoxy-2'-fluoroguanosine-3'-phosphate
  modified_base 10: mod_base = OTHER; note = 2'-deoxy-2'-fluorouridine-3'-phosphate
  modified_base 11: mod_base = OTHER; note = 2'-deoxy-2'-fluorouridine-3'-phosphate
  modified_base 12: mod_base = OTHER; note = 2'-O-methylcytidine-3'-phosphate
  modified_base 13: mod_base = OTHER; note = 2'-O-methylcytidine-3'-phosphate
  modified_base 14: mod_base = OTHER; note = 2'-O-methyladenosine-3'-phosphate
  modified_base 15: mod_base = OTHER; note = 2'-O-methyluridine-3'-phosphate
  modified_base 16: mod_base = OTHER; note = 2'-O-methylguanosine-3'-phosphate
  modified_base 17: mod_base = OTHER; note = 2'-O-methyluridine-3'-phosphate
  modified_base 18: mod_base = OTHER; note = 2'-O-methylcytidine-3'-phosphate
  modified_base 19: mod_base = OTHER; note = 2'-O-methylcytidine-3'-phosphorothioate
  modified_base 20: mod_base = OTHER; note = 2'-O-methyladenosine-3'-phosphorothioate
  modified_base 21: mod_base = OTHER; note = 2'-O-methyladenosine
ggccaccagttccatgtccaa

SEQ ID NO: 4073 - RNA, 21 nt, synthetic construct
  source 1..21: mol_type = other RNA
  modified_base 1: mod_base = OTHER; note = 2'-O-methylcytidine-3'-phosphorothioate
  modified_base 2: mod_base = OTHER; note = 2'-O-methylcytidine-3'-phosphorothioate
  modified_base 3: mod_base = OTHER; note = 2'-O-methyladenosine-3'-phosphate
  modified_base 4: mod_base = OTHER; note = 2'-O-methylcytidine-3'-phosphate
  modified_base 5: mod_base = OTHER; note = 2'-O-methyluridine-3'-phosphate
  modified_base 6: mod_base = OTHER; note = 2'-O-hexadecyl-adenosine-3'-phosphate
  modified_base 7: mod_base = OTHER; note = 2'-deoxy-2'-fluorocytidine-3'-phosphate
  modified_base 8: mod_base = OTHER; note = 2'-O-methyladenosine-3'-phosphate
  modified_base 9: mod_base = OTHER; note = 2'-deoxy-2'-fluoroadenosine-3'-phosphate
  modified_base 10: mod_base = OTHER; note = 2'-deoxy-2'-fluorocytidine-3'-phosphate
  modified_base 11: mod_base = OTHER; note = 2'-deoxy-2'-fluorouridine-3'-phosphate
  modified_base 12: mod_base = OTHER; note = 2'-O-methylguanosine-3'-phosphate
  modified_base 13: mod_base = OTHER; note = 2'-O-methylcytidine-3'-phosphate
  modified_base 14: mod_base = OTHER; note = 2'-O-methyladenosine-3'-phosphate
  modified_base 15: mod_base = OTHER; note = 2'-O-methylguanosine-3'-phosphate
  modified_base 16: mod_base = OTHER; note = 2'-O-methylcytidine-3'-phosphate
  modified_base 17: mod_base = OTHER; note = 2'-O-methylcytidine-3'-phosphate
  modified_base 18: mod_base = OTHER; note = 2'-O-methyladenosine-3'-phosphate
  modified_base 19: mod_base = OTHER; note = 2'-O-methylcytidine-3'-phosphorothioate
  modified_base 20: mod_base = OTHER; note = 2'-O-methyluridine-3'-phosphorothioate
  modified_base 21: mod_base = OTHER; note = 2'-O-methyladenosine
ccactacaactgcagccacta

SEQ ID NO: 4074 - RNA, 21 nt, synthetic construct
  source 1..21: mol_type = other RNA
  modified_base 1: mod_base = OTHER; note = 2'-O-methylcytidine-3'-phosphorothioate
  modified_base 2: mod_base = OTHER; note = 2'-O-methyladenosine-3'-phosphorothioate
  modified_base 3: mod_base = OTHER; note = 2'-O-methylguanosine-3'-phosphate
  modified_base 4: mod_base = OTHER; note = 2'-O-methylcytidine-3'-phosphate
  modified_base 5: mod_base = OTHER; note = 2'-O-methyladenosine-3'-phosphate
  modified_base 6: mod_base = OTHER; note = 2'-O-hexadecyl-cytidine-3'-phosphate
  modified_base 7: mod_base = OTHER; note = 2'-deoxy-2'-fluorouridine-3'-phosphate
  modified_base 8: mod_base = OTHER; note = 2'-O-methyladenosine-3'-phosphate
  modified_base 9: mod_base = OTHER; note = 2'-deoxy-2'-fluorocytidine-3'-phosphate
  modified_base 10: mod_base = OTHER; note = 2'-deoxy-2'-fluoroadenosine-3'-phosphate
  modified_base 11: mod_base = OTHER; note = 2'-deoxy-2'-fluoroguanosine-3'-phosphate
  modified_base 12: mod_base = OTHER; note = 2'-O-methylcytidine-3'-phosphate
  modified_base 13: mod_base = OTHER; note = 2'-O-methylcytidine-3'-phosphate
  modified_base 14: mod_base = OTHER; note = 2'-O-methyladenosine-3'-phosphate
  modified_base 15: mod_base = OTHER; note = 2'-O-methylcytidine-3'-phosphate
  modified_base 16: mod_base = OTHER; note = 2'-O-methylcytidine-3'-phosphate
  modified_base 17: mod_base = OTHER; note = 2'-O-methylguanosine-3'-phosphate
  modified_base 18: mod_base = OTHER; note = 2'-O-methyluridine-3'-phosphate
  modified_base 19: mod_base = OTHER; note = 2'-O-methylguanosine-3'-phosphorothioate
  modified_base 20: mod_base = OTHER; note = 2'-O-methyladenosine-3'-phosphorothioate
  modified_base 21: mod_base = OTHER; note = 2'-O-methyladenosine
cagcactacagccaccgtgaa

SEQ ID NO: 4075 - RNA, 21 nt, synthetic construct
  source 1..21: mol_type = other RNA
  modified_base 1: mod_base = OTHER; note = 2'-O-methyladenosine-3'-phosphorothioate
  modified_base 2: mod_base = OTHER; note = 2'-O-methylcytidine-3'-phosphorothioate
  modified_base 3: mod_base = OTHER; note = 2'-O-methylcytidine-3'-phosphate
  modified_base 4: mod_base = OTHER; note = 2'-O-methylcytidine-3'-phosphate
  modified_base 5: mod_base = OTHER; note = 2'-O-methyluridine-3'-phosphate
  modified_base 6: mod_base = OTHER; note = 2'-O-hexadecyl-cytidine-3'-phosphate
  modified_base 7: mod_base = OTHER; note = 2'-deoxy-2'-fluoroadenosine-3'-phosphate
  modified_base 8: mod_base = OTHER; note = 2'-O-methyladenosine-3'-phosphate
  modified_base 9: mod_base = OTHER; note = 2'-deoxy-2'-fluoroadenosine-3'-phosphate
  modified_base 10: mod_base = OTHER; note = 2'-deoxy-2'-fluoroguanosine-3'-phosphate
  modified_base 11: mod_base = OTHER; note = 2'-deoxy-2'-fluorouridine-3'-phosphate
  modified_base 12: mod_base = OTHER; note = 2'-O-methylguanosine-3'-phosphate
  modified_base 13: mod_base = OTHER; note = 2'-O-methylcytidine-3'-phosphate
  modified_base 14: mod_base = OTHER; note = 2'-O-methyluridine-3'-phosphate
  modified_base 15: mod_base = OTHER; note = 2'-O-methylguanosine-3'-phosphate
  modified_base 16: mod_base = OTHER; note = 2'-O-methyladenosine-3'-phosphate
  modified_base 17: mod_base = OTHER; note = 2'-O-methylcytidine-3'-phosphate
  modified_base 18: mod_base = OTHER; note = 2'-O-methylcytidine-3'-phosphate
  modified_base 19: mod_base = OTHER; note = 2'-O-methyladenosine-3'-phosphorothioate
  modified_base 20: mod_base = OTHER; note = 2'-O-methylguanosine-3'-phosphorothioate
  modified_base 21: mod_base = OTHER; note = 2'-O-methyladenosine
accctcaaagtgctgaccaga

SEQ ID NO: 4076 - RNA, 21 nt, synthetic construct
  source 1..21: mol_type = other RNA
  modified_base 1: mod_base = OTHER; note = 2'-O-methyladenosine-3'-phosphorothioate
  modified_base 2: mod_base = OTHER; note = 2'-O-methylcytidine-3'-phosphorothioate
  modified_base 3: mod_base = OTHER; note = 2'-O-methylcytidine-3'-phosphate
  modified_base 4: mod_base = OTHER; note = 2'-O-methylcytidine-3'-phosphate
  modified_base 5: mod_base = OTHER; note = 2'-O-methyladenosine-3'-phosphate
  modified_base 6: mod_base = OTHER; note = 2'-O-hexadecyl-cytidine-3'-phosphate
  modified_base 7: mod_base = OTHER; note = 2'-deoxy-2'-fluoroadenosine-3'-phosphate
  modified_base 8: mod_base = OTHER; note = 2'-O-methylguanosine-3'-phosphate
  modified_base 9: mod_base = OTHER; note = 2'-deoxy-2'-fluorouridine-3'-phosphate
  modified_base 10: mod_base = OTHER; note = 2'-deoxy-2'-fluorocytidine-3'-phosphate
  modified_base 11: mod_base = OTHER; note = 2'-deoxy-2'-fluoroadenosine-3'-phosphate
  modified_base 12: mod_base = OTHER; note = 2'-O-methyluridine-3'-phosphate
  modified_base 13: mod_base = OTHER; note = 2'-O-methylcytidine-3'-phosphate
  modified_base 14: mod_base = OTHER; note = 2'-O-methyladenosine-3'-phosphate
  modified_base 15: mod_base = OTHER; note = 2'-O-methylguanosine-3'-phosphate
  modified_base 16: mod_base = OTHER; note = 2'-O-methylcytidine-3'-phosphate
  modified_base 17: mod_base = OTHER; note = 2'-O-methyluridine-3'-phosphate
  modified_base 18: mod_base = OTHER; note = 2'-O-methylcytidine-3'-phosphate
  modified_base 19: mod_base = OTHER; note = 2'-O-methylcytidine-3'-phosphorothioate
  modified_base 20: mod_base = OTHER; note = 2'-O-methyladenosine-3'-phosphorothioate
  modified_base 21: mod_base = OTHER; note = 2'-O-methyladenosine
acccacagtcatcagctccaa

SEQ ID NO: 4077 - RNA, 21 nt, synthetic construct
  source 1..21: mol_type = other RNA
  modified_base 1: mod_base = OTHER; note = 2'-O-methylcytidine-3'-phosphorothioate
  modified_base 2: mod_base = OTHER; note = 2'-O-methylcytidine-3'-phosphorothioate
  modified_base 3: mod_base = OTHER; note = 2'-O-methyladenosine-3'-phosphate
  modified_base 4: mod_base = OTHER; note = 2'-O-methylcytidine-3'-phosphate
  modified_base 5: mod_base = OTHER; note = 2'-O-methyluridine-3'-phosphate
  modified_base 6: mod_base = OTHER; note = 2'-O-hexadecyl-cytidine-3'-phosphate
  modified_base 7: mod_base = OTHER; note = 2'-deoxy-2'-fluorocytidine-3'-phosphate
  modified_base 8: mod_base = OTHER; note = 2'-O-methylcytidine-3'-phosphate
  modified_base 9: mod_base = OTHER; note = 2'-deoxy-2'-fluorouridine-3'-phosphate
  modified_base 10: mod_base = OTHER; note = 2'-deoxy-2'-fluorocytidine-3'-phosphate
  modified_base 11: mod_base = OTHER; note = 2'-deoxy-2'-fluorocytidine-3'-phosphate
  modified_base 12: mod_base = OTHER; note = 2'-O-methyluridine-3'-phosphate
  modified_base 13: mod_base = OTHER; note = 2'-O-methylcytidine-3'-phosphate
  modified_base 14: mod_base = OTHER; note = 2'-O-methylcytidine-3'-phosphate
  modified_base 15: mod_base = OTHER; note = 2'-O-methyladenosine-3'-phosphate
  modified_base 16: mod_base = OTHER; note = 2'-O-methylguanosine-3'-phosphate
  modified_base 17: mod_base = OTHER; note = 2'-O-methyluridine-3'-phosphate
  modified_base 18: mod_base = OTHER; note = 2'-O-methylcytidine-3'-phosphate
  modified_base 19: mod_base = OTHER; note = 2'-O-methylcytidine-3'-phosphorothioate
  modified_base 20: mod_base = OTHER; note = 2'-O-methyladenosine-3'-phosphorothioate
  modified_base 21: mod_base = OTHER; note = 2'-O-methyladenosine
ccactccctcctccagtccaa

SEQ ID NO: 4078 - RNA, 21 nt, synthetic construct
  source 1..21: mol_type = other RNA
  modified_base 1: mod_base = OTHER; note = 2'-O-methylcytidine-3'-phosphorothioate
  modified_base 2: mod_base = OTHER; note = 2'-O-methyluridine-3'-phosphorothioate
  modified_base 3: mod_base = OTHER; note = 2'-O-methyladenosine-3'-phosphate
  modified_base 4: mod_base = OTHER; note = 2'-O-methylcytidine-3'-phosphate
  modified_base 5: mod_base = OTHER; note = 2'-O-methylcytidine-3'-phosphate
  modified_base 6: mod_base = OTHER; note = 2'-O-hexadecyl-adenosine-3'-phosphate
  modified_base 7: mod_base = OTHER; note = 2'-deoxy-2'-fluoroguanosine-3'-phosphate
  modified_base 8: mod_base = OTHER; note = 2'-O-methylcytidine-3'-phosphate
  modified_base 9: mod_base = OTHER; note = 2'-deoxy-2'-fluoroguanosine-3'-phosphate
  modified_base 10: mod_base = OTHER; note = 2'-deoxy-2'-fluorouridine-3'-phosphate
  modified_base 11: mod_base = OTHER; note = 2'-deoxy-2'-fluorouridine-3'-phosphate
  modified_base 12: mod_base = OTHER; note = 2'-O-methyladenosine-3'-phosphate
  modified_base 13: mod_base = OTHER; note = 2'-O-methylcytidine-3'-phosphate
  modified_base 14: mod_base = OTHER; note = 2'-O-methyladenosine-3'-phosphate
  modified_base 15: mod_base = OTHER; note = 2'-O-methylguanosine-3'-phosphate
  modified_base 16: mod_base = OTHER; note = 2'-O-methylcytidine-3'-phosphate
  modified_base 17: mod_base = OTHER; note = 2'-O-methylcytidine-3'-phosphate
  modified_base 18: mod_base = OTHER; note = 2'-O-methyladenosine-3'-phosphate
  modified_base 19: mod_base = OTHER; note = 2'-O-methyluridine-3'-phosphorothioate
  modified_base 20: mod_base = OTHER; note = 2'-O-methylcytidine-3'-phosphorothioate
  modified_base 21: mod_base = OTHER; note = 2'-O-methyladenosine
ctaccagcgttacagccatca

SEQ ID NO: 4079 - RNA, 21 nt, synthetic construct
  source 1..21: mol_type = other RNA
  modified_base 1: mod_base = OTHER; note = 2'-O-methylcytidine-3'-phosphorothioate
  modified_base 2: mod_base = OTHER; note = 2'-O-methylcytidine-3'-phosphorothioate
  modified_base 3: mod_base = OTHER; note = 2'-O-methyluridine-3'-phosphate
  modified_base 4: mod_base = OTHER; note = 2'-O-methylcytidine-3'-phosphate
  modified_base 5: mod_base = OTHER; note = 2'-O-methyluridine-3'-phosphate
  modified_base 6: mod_base = OTHER; note = 2'-O-hexadecyl-adenosine-3'-phosphate
  modified_base 7: mod_base = OTHER; note = 2'-deoxy-2'-fluorocytidine-3'-phosphate
  modified_base 8: mod_base = OTHER; note = 2'-O-methyluridine-3'-phosphate
  modified_base 9: mod_base = OTHER; note = 2'-deoxy-2'-fluorocytidine-3'-phosphate
  modified_base 10: mod_base = OTHER; note = 2'-deoxy-2'-fluorocytidine-3'-phosphate
  modified_base 11: mod_base = OTHER; note = 2'-deoxy-2'-fluoroadenosine-3'-phosphate
  modified_base 12: mod_base = OTHER; note = 2'-O-methylguanosine-3'-phosphate
  modified_base 13: mod_base = OTHER; note = 2'-O-methyladenosine-3'-phosphate
  modified_base 14: mod_base = OTHER; note = 2'-O-methylguanosine-3'-phosphate
  modified_base 15: mod_base = OTHER; note = 2'-O-methyladenosine-3'-phosphate
  modified_base 16: mod_base = OTHER; note = 2'-O-methylcytidine-3'-phosphate
  modified_base 17: mod_base = OTHER; note = 2'-O-methyluridine-3'-phosphate
  modified_base 18: mod_base = OTHER; note = 2'-O-methylguanosine-3'-phosphate
  modified_base 19: mod_base = OTHER; note = 2'-O-methyluridine-3'-phosphorothioate
  modified_base 20: mod_base = OTHER; note = 2'-O-methylcytidine-3'-phosphorothioate
  modified_base 21: mod_base = OTHER; note = 2'-O-methyladenosine
cctctactccagagactgtca

SEQ ID NO: 4080 - RNA, 21 nt, synthetic construct
  source 1..21: mol_type = other RNA
  modified_base 1: mod_base = OTHER; note = 2'-O-methyladenosine-3'-phosphorothioate
  modified_base 2: mod_base = OTHER; note = 2'-O-methylguanosine-3'-phosphorothioate
  modified_base 3: mod_base = OTHER; note = 2'-O-methylcytidine-3'-phosphate
  modified_base 4: mod_base = OTHER; note = 2'-O-methyluridine-3'-phosphate
  modified_base 5: mod_base = OTHER; note = 2'-O-methylcytidine-3'-phosphate
  modified_base 6: mod_base = OTHER; note = 2'-O-hexadecyl-adenosine-3'-phosphate
  modified_base 7: mod_base = OTHER; note = 2'-deoxy-2'-fluorocytidine-3'-phosphate
  modified_base 8: mod_base = OTHER; note = 2'-O-methyladenosine-3'-phosphate
  modified_base 9: mod_base = OTHER; note = 2'-deoxy-2'-fluorocytidine-3'-phosphate
  modified_base 10: mod_base = OTHER; note = 2'-deoxy-2'-fluorouridine-3'-phosphate
  modified_base 11: mod_base = OTHER; note = 2'-deoxy-2'-fluoroadenosine-3'-phosphate
  modified_base 12: mod_base = OTHER; note = 2'-O-methylcytidine-3'-phosphate
  modified_base 13: mod_base = OTHER; note = 2'-O-methylcytidine-3'-phosphate
  modified_base 14: mod_base = OTHER; note = 2'-O-methyladenosine-3'-phosphate
  modified_base 15: mod_base = OTHER; note = 2'-O-methyladenosine-3'-phosphate
  modified_base 16: mod_base = OTHER; note = 2'-O-methyladenosine-3'-phosphate
  modified_base 17: mod_base = OTHER; note = 2'-O-methylguanosine-3'-phosphate
  modified_base 18: mod_base = OTHER; note = 2'-O-methyluridine-3'-phosphate
  modified_base 19: mod_base = OTHER; note = 2'-O-methylguanosine-3'-phosphorothioate
  modified_base 20: mod_base = OTHER; note = 2'-O-methylcytidine-3'-phosphorothioate
  modified_base 21: mod_base = OTHER; note = 2'-O-methyladenosine
agctcacactaccaaagtgca

SEQ ID NO: 4081 - RNA, 21 nt, synthetic construct
  source 1..21: mol_type = other RNA
  modified_base 1: mod_base = OTHER; note = 2'-O-methylcytidine-3'-phosphorothioate
  modified_base 2: mod_base = OTHER; note = 2'-O-methyluridine-3'-phosphorothioate
  modified_base 3: mod_base = OTHER; note = 2'-O-methyladenosine-3'-phosphate
  modified_base 4: mod_base = OTHER; note = 2'-O-methylcytidine-3'-phosphate
  modified_base 5: mod_base = OTHER; note = 2'-O-methylcytidine-3'-phosphate
  modified_base 6: mod_base = OTHER; note = 2'-O-hexadecyl-adenosine-3'-phosphate
  modified_base 7: mod_base = OTHER; note = 2'-deoxy-2'-fluorocytidine-3'-phosphate
  modified_base 8: mod_base = OTHER; note = 2'-O-methyladenosine-3'-phosphate
  modified_base 9: mod_base = OTHER; note = 2'-deoxy-2'-fluoroadenosine-3'-phosphate
  modified_base 10: mod_base = OTHER; note = 2'-deoxy-2'-fluorocytidine-3'-phosphate
  modified_base 11: mod_base = OTHER; note = 2'-deoxy-2'-fluorocytidine-3'-phosphate
  modified_base 12: mod_base = OTHER; note = 2'-O-methyladenosine-3'-phosphate
  modified_base 13: mod_base = OTHER; note = 2'-O-methylcytidine-3'-phosphate
  modified_base 14: mod_base = OTHER; note = 2'-O-methylguanosine-3'-phosphate
  modified_base 15: mod_base = OTHER; note = 2'-O-methylguanosine-3'-phosphate
  modified_base 16: mod_base = OTHER; note = 2'-O-methylguanosine-3'-phosphate
  modified_base 17: mod_base = OTHER; note = 2'-O-methylcytidine-3'-phosphate
  modified_base 18: mod_base = OTHER; note = 2'-O-methyluridine-3'-phosphate
  modified_base 19: mod_base = OTHER; note = 2'-O-methyluridine-3'-phosphorothioate
  modified_base 20: mod_base = OTHER; note = 2'-O-methylcytidine-3'-phosphorothioate
  modified_base 21: mod_base = OTHER; note = 2'-O-methyladenosine
ctaccacaaccacgggcttca

SEQ ID NO: 4082 - RNA, 21 nt, synthetic construct
  source 1..21: mol_type = other RNA
  modified_base 1: mod_base = OTHER; note = 2'-O-methylguanosine-3'-phosphorothioate
  modified_base 2: mod_base = OTHER; note = 2'-O-methylguanosine-3'-phosphorothioate
  modified_base 3: mod_base = OTHER; note = 2'-O-methylcytidine-3'-phosphate
  modified_base 4: mod_base = OTHER; note = 2'-O-methylcytidine-3'-phosphate
  modified_base 5: mod_base = OTHER; note = 2'-O-methyladenosine-3'-phosphate
  modified_base 6: mod_base = OTHER; note = 2'-O-hexadecyl-cytidine-3'-phosphate
  modified_base 7: mod_base = OTHER; note = 2'-deoxy-2'-fluorouridine-3'-phosphate
  modified_base 8: mod_base = OTHER; note = 2'-O-methyladenosine-3'-phosphate
  modified_base 9: mod_base = OTHER; note = 2'-deoxy-2'-fluorocytidine-3'-phosphate
  modified_base 10: mod_base = OTHER; note = 2'-deoxy-2'-fluoroguanosine-3'-phosphate
  modified_base 11: mod_base = OTHER; note = 2'-deoxy-2'-fluoroadenosine-3'-phosphate
  modified_base 12: mod_base = OTHER; note = 2'-O-methyluridine-3'-phosphate
  modified_base 13: mod_base = OTHER; note = 2'-O-methylcytidine-3'-phosphate
  modified_base 14: mod_base = OTHER; note = 2'-O-methyladenosine-3'-phosphate
  modified_base 15: mod_base = OTHER; note = 2'-O-methylcytidine-3'-phosphate
  modified_base 16: mod_base = OTHER; note = 2'-O-methyladenosine-3'-phosphate
  modified_base 17: mod_base = OTHER; note = 2'-O-methylguanosine-3'-phosphate
  modified_base 18: mod_base = OTHER; note = 2'-O-methylcytidine-3'-phosphate
  modified_base 19: mod_base = OTHER; note = 2'-O-methylcytidine-3'-phosphorothioate
  modified_base 20: mod_base = OTHER; note = 2'-O-methyladenosine-3'-phosphorothioate
  modified_base 21: mod_base = OTHER; note = 2'-O-methyladenosine
ggccactacgatcacagccaa

SEQ ID NO: 4083 - RNA, 21 nt, synthetic construct
  source 1..21: mol_type = other RNA
  modified_base 1: mod_base = OTHER; note = 2'-O-methylcytidine-3'-phosphorothioate
  modified_base 2: mod_base = OTHER; note = 2'-O-methyladenosine-3'-phosphorothioate
  modified_base 3: mod_base = OTHER; note = 2'-O-methylcytidine-3'-phosphate
  modified_base 4: mod_base = OTHER; note = 2'-O-methylcytidine-3'-phosphate
  modified_base 5: mod_base = OTHER; note = 2'-O-methyladenosine-3'-phosphate
  modified_base 6: mod_base = OTHER; note = 2'-O-hexadecyl-cytidine-3'-phosphate
  modified_base 7: mod_base = OTHER; note = 2'-deoxy-2'-fluoroguanosine-3'-phosphate
  modified_base 8: mod_base = OTHER; note = 2'-O-methylguanosine-3'-phosphate
  modified_base 9: mod_base = OTHER; note = 2'-deoxy-2'-fluorocytidine-3'-phosphate
  modified_base 10: mod_base = OTHER; note = 2'-deoxy-2'-fluorocytidine-3'-phosphate
  modified_base 11: mod_base = OTHER; note = 2'-deoxy-2'-fluoroadenosine-3'-phosphate
  modified_base 12: mod_base = OTHER; note = 2'-O-methylcytidine-3'-phosphate
  modified_base 13: mod_base = OTHER; note = 2'-O-methylcytidine-3'-phosphate
  modified_base 14: mod_base = OTHER; note = 2'-O-methyladenosine-3'-phosphate
  modified_base 15: mod_base = OTHER; note = 2'-O-methylcytidine-3'-phosphate
  modified_base 16: mod_base = OTHER; note = 2'-O-methyladenosine-3'-phosphate
  modified_base 17: mod_base = OTHER; note = 2'-O-methylcytidine-3'-phosphate
  modified_base 18: mod_base = OTHER; note = 2'-O-methyladenosine-3'-phosphate
  modified_base 19: mod_base = OTHER; note = 2'-O-methylcytidine-3'-phosphorothioate
  modified_base 20: mod_base = OTHER; note = 2'-O-methylguanosine-3'-phosphorothioate
  modified_base 21: mod_base = OTHER; note = 2'-O-methyladenosine
caccacggccaccacacacga

SEQ ID NO: 4084 - RNA, 21 nt, synthetic construct
  source 1..21: mol_type = other RNA
  modified_base 1: mod_base = OTHER; note = 2'-O-methylcytidine-3'-phosphorothioate
  modified_base 2: mod_base = OTHER; note = 2'-O-methyladenosine-3'-phosphorothioate
  modified_base 3: mod_base = OTHER; note = 2'-O-methylguanosine-3'-phosphate
  modified_base 4: mod_base = OTHER; note = 2'-O-methylcytidine-3'-phosphate
  modified_base 5: mod_base = OTHER; note = 2'-O-methyladenosine-3'-phosphate
  modified_base 6: mod_base = OTHER; note = 2'-O-hexadecyl-guanosine-3'-phosphate
  modified_base 7: mod_base = OTHER; note = 2'-deoxy-2'-fluorocytidine-3'-phosphate
  modified_base 8: mod_base = OTHER; note = 2'-O-methyladenosine-3'-phosphate
  modified_base 9: mod_base = OTHER; note = 2'-deoxy-2'-fluoroadenosine-3'-phosphate
  modified_base 10: mod_base = OTHER; note = 2'-deoxy-2'-fluorocytidine-3'-phosphate
  modified_base 11: mod_base = OTHER; note = 2'-deoxy-2'-fluorocytidine-3'-phosphate
  modified_base 12: mod_base = OTHER; note = 2'-O-methyladenosine-3'-phosphate
  modified_base 13: mod_base = OTHER; note = 2'-O-methylcytidine-3'-phosphate
  modified_base 14: mod_base = OTHER; note = 2'-O-methylcytidine-3'-phosphate
  modified_base 15: mod_base = OTHER; note = 2'-O-methyladenosine-3'-phosphate
  modified_base 16: mod_base = OTHER; note = 2'-O-methylguanosine-3'-phosphate
  modified_base 17: mod_base = OTHER; note = 2'-O-methyluridine-3'-phosphate
  modified_base 18: mod_base = OTHER; note = 2'-O-methyladenosine-3'-phosphate
  modified_base 19: mod_base = OTHER; note = 2'-O-methylcytidine-3'-phosphorothioate
  modified_base 20: mod_base = OTHER; note = 2'-O-methylcytidine-3'-phosphorothioate
  modified_base 21: mod_base = OTHER; note = 2'-O-methyladenosine
cagcagcaaccaccagtacca

SEQ ID NO: 4085 - RNA, 21 nt, synthetic construct
  source 1..21: mol_type = other RNA
  modified_base 1: mod_base = OTHER; note = 2'-O-methylcytidine-3'-phosphorothioate
  modified_base 2: mod_base = OTHER; note = 2'-O-methylcytidine-3'-phosphorothioate
  modified_base 3: mod_base = OTHER; note = 2'-O-methyluridine-3'-phosphate
  modified_base 4: mod_base = OTHER; note = 2'-O-methylcytidine-3'-phosphate
  modified_base 5: mod_base = OTHER; note = 2'-O-methylcytidine-3'-phosphate
  modified_base 6: mod_base = OTHER; note = 2'-O-hexadecyl-adenosine-3'-phosphate
  modified_base 7: mod_base = OTHER; note = 2'-deoxy-2'-fluoroguanosine-3'-phosphate
  modified_base 8: mod_base = OTHER; note = 2'-O-methylguanosine-3'-phosphate
  modified_base 9: mod_base = OTHER; note = 2'-deoxy-2'-fluoroadenosine-3'-phosphate
  modified_base 10: mod_base = OTHER; note = 2'-deoxy-2'-fluorocytidine-3'-phosphate
  modified_base 11: mod_base = OTHER; note = 2'-deoxy-2'-fluorocytidine-3'-phosphate
  modified_base 12: mod_base = OTHER; note = 2'-O-methyladenosine-3'-phosphate
  modified_base 13: mod_base = OTHER; note = 2'-O-methylcytidine-3'-phosphate
  modified_base 14: mod_base = OTHER; note = 2'-O-methyladenosine-3'-phosphate
  modified_base 15: mod_base = OTHER; note = 2'-O-methylguanosine-3'-phosphate
  modified_base 16: mod_base = OTHER; note = 2'-O-methylcytidine-3'-phosphate
  modified_base 17: mod_base = OTHER; note = 2'-O-methylcytidine-3'-phosphate
  modified_base 18: mod_base = OTHER; note = 2'-O-methyladenosine-3'-phosphate
  modified_base 19: mod_base = OTHER; note = 2'-O-methylcytidine-3'-phosphorothioate
  modified_base 20: mod_base = OTHER; note = 2'-O-methyladenosine-3'-phosphorothioate
  modified_base 21: mod_base = OTHER; note = 2'-O-methyladenosine
cctccaggaccacagccacaa

SEQ ID NO: 4086 - RNA, 21 nt, synthetic construct
  source 1..21: mol_type = other RNA
  modified_base 1: mod_base = OTHER; note = 2'-O-methyladenosine-3'-phosphorothioate
  modified_base 2: mod_base = OTHER; note = 2'-O-methylcytidine-3'-phosphorothioate
  modified_base 3: mod_base = OTHER; note = 2'-O-methylcytidine-3'-phosphate
  modified_base 4: mod_base = OTHER; note = 2'-O-methyladenosine-3'-phosphate
  modified_base 5: mod_base = OTHER; note = 2'-O-methylcytidine-3'-phosphate
  modified_base 6: mod_base = OTHER; note = 2'-O-hexadecyl-guanosine-3'-phosphate
  modified_base 7: mod_base = OTHER; note = 2'-deoxy-2'-fluoroguanosine-3'-phosphate
  modified_base 8: mod_base = OTHER; note = 2'-O-methyluridine-3'-phosphate
  modified_base 9: mod_base = OTHER; note = 2'-deoxy-2'-fluoroguanosine-3'-phosphate
  modified_base 10: mod_base = OTHER; note = 2'-deoxy-2'-fluoroguanosine-3'-phosphate
  modified_base 11: mod_base = OTHER; note = 2'-deoxy-2'-fluorouridine-3'-phosphate
  modified_base 12: mod_base = OTHER; note = 2'-O-methylguanosine-3'-phosphate
  modified_base 13: mod_base = OTHER; note = 2'-O-methyladenosine-3'-phosphate
  modified_base 14: mod_base = OTHER; note = 2'-O-methylcytidine-3'-phosphate
  modified_base 15: mod_base = OTHER; note = 2'-O-methylcytidine-3'-phosphate
  modified_base 16: mod_base = OTHER; note = 2'-O-methyladenosine-3'-phosphate
  modified_base 17: mod_base = OTHER; note = 2'-O-methylcytidine-3'-phosphate
  modified_base 18: mod_base = OTHER; note = 2'-O-methylguanosine-3'-phosphate
  modified_base 19: mod_base = OTHER; note = 2'-O-methylguanosine-3'-phosphorothioate
  modified_base 20: mod_base = OTHER; note = 2'-O-methylguanosine-3'-phosphorothioate
  modified_base 21: mod_base = OTHER; note = 2'-O-methyladenosine
accacggtggtgaccacggga

SEQ ID NO: 4087 - RNA, 21 nt, synthetic construct
  source 1..21: mol_type = other RNA
  modified_base 1: mod_base = OTHER; note = 2'-O-methylcytidine-3'-phosphorothioate
  modified_base 2: mod_base = OTHER; note = 2'-O-methylguanosine-3'-phosphorothioate
  modified_base 3: mod_base = OTHER; note = 2'-O-methylguanosine-3'-phosphate
  modified_base 4: mod_base = OTHER; note = 2'-O-methylcytidine-3'-phosphate
  modified_base 5: mod_base = OTHER; note = 2'-O-methylcytidine-3'-phosphate
  modified_base 6: mod_base = OTHER; note = 2'-O-hexadecyl-adenosine-3'-phosphate
  modified_base 7: mod_base = OTHER; note = 2'-deoxy-2'-fluorocytidine-3'-phosphate
  modified_base 8: mod_base = OTHER; note = 2'-O-methylguanosine-3'-phosphate
  modified_base 9: mod_base = OTHER; note = 2'-deoxy-2'-fluorocytidine-3'-phosphate
  modified_base 10: mod_base = OTHER; note = 2'-deoxy-2'-fluorocytidine-3'-phosphate
  modified_base 11: mod_base = OTHER; note = 2'-deoxy-2'-fluorocytidine-3'-phosphate
  modified_base 12: mod_base = OTHER; note = 2'-O-methyluridine-3'-phosphate
  modified_base 13: mod_base = OTHER; note = 2'-O-methylcytidine-3'-phosphate
  modified_base 14: mod_base = OTHER; note = 2'-O-methylcytidine-3'-phosphate
  modified_base 15: mod_base = OTHER; note = 2'-O-methyluridine-3'-phosphate
  modified_base 16: mod_base = OTHER; note = 2'-O-methylcytidine-3'-phosphate
  modified_base 17: mod_base = OTHER; note = 2'-O-methyladenosine-3'-phosphate
  modified_base 18: mod_base = OTHER; note = 2'-O-methyladenosine-3'-phosphate
  modified_base 19: mod_base = OTHER; note = 2'-O-methylcytidine-3'-phosphorothioate
  modified_base 20: mod_base = OTHER; note = 2'-O-methyluridine-3'-phosphorothioate
  modified_base 21: mod_base = OTHER; note = 2'-O-methyladenosine
cggccacgccctcctcaacta

SEQ ID NO: 4088 - RNA, 21 nt, synthetic construct
  source 1..21: mol_type = other RNA
  modified_base 1: mod_base = OTHER; note = 2'-O-methylcytidine-3'-phosphorothioate
  modified_base 2: mod_base = OTHER; note = 2'-O-methyluridine-3'-phosphorothioate
  modified_base 3: mod_base = OTHER; note = 2'-O-methylguanosine-3'-phosphate
  modified_base 4: mod_base = OTHER; note = 2'-O-methylguanosine-3'-phosphate
  modified_base 5: mod_base = OTHER; note = 2'-O-methyladenosine-3'-phosphate
  modified_base 6: mod_base = OTHER; note = 2'-O-hexadecyl-uridine-3'-phosphate
  modified_base 7: mod_base = OTHER; note = 2'-deoxy-2'-fluorocytidine-3'-phosphate
  modified_base 8: mod_base = OTHER; note = 2'-O-methylcytidine-3'-phosphate
  modified_base 9: mod_base = OTHER; note = 2'-deoxy-2'-fluorouridine-3'-phosphate
  modified_base 10: mod_base = OTHER; note = 2'-deoxy-2'-fluorocytidine-3'-phosphate
  modified_base 11: mod_base = OTHER; note = 2'-deoxy-2'-fluoroadenosine-3'-phosphate
  modified_base 12: mod_base = OTHER; note = 2'-O-methylcytidine-3'-phosphate
  modified_base 13: mod_base = OTHER; note = 2'-O-methyladenosine-3'-phosphate
  modified_base 14: mod_base = OTHER; note = 2'-O-methyladenosine-3'-phosphate
  modified_base 15: mod_base = OTHER; note = 2'-O-methyladenosine-3'-phosphate
  modified_base 16: mod_base = OTHER; note = 2'-O-methylguanosine-3'-phosphate
  modified_base 17: mod_base = OTHER; note = 2'-O-methylcytidine-3'-phosphate
  modified_base 18: mod_base = OTHER; note = 2'-O-methyluridine-3'-phosphate
  modified_base 19: mod_base = OTHER; note = 2'-O-methylguanosine-3'-phosphorothioate
  modified_base 20: mod_base = OTHER; note = 2'-O-methyladenosine-3'-phosphorothioate
  modified_base 21: mod_base = OTHER; note = 2'-O-methyladenosine
ctggatcctcacaaagctgaa

SEQ ID NO: 4089 - RNA, 21 nt, synthetic construct
  source 1..21: mol_type = other RNA
  modified_base 1: mod_base = OTHER; note = 2'-O-methyladenosine-3'-phosphorothioate
  modified_base 2: mod_base = OTHER; note = 2'-O-methylcytidine-3'-phosphorothioate
  modified_base 3: mod_base = OTHER; note = 2'-O-methylcytidine-3'-phosphate
  modified_base 4: mod_base = OTHER; note = 2'-O-methylcytidine-3'-phosphate
  modified_base 5: mod_base = OTHER; note = 2'-O-methyladenosine-3'-phosphate
  modified_base 6: mod_base = OTHER; note = 2'-O-hexadecyl-cytidine-3'-phosphate
  modified_base 7: mod_base = OTHER; note = 2'-deoxy-2'-fluoroadenosine-3'-phosphate
  modified_base 8: mod_base = OTHER; note = 2'-O-methyladenosine-3'-phosphate
  modified_base 9: mod_base = OTHER; note = 2'-deoxy-2'-fluorocytidine-3'-phosphate
  modified_base 10: mod_base = OTHER; note = 2'-deoxy-2'-fluorocytidine-3'-phosphate
  modified_base 11: mod_base = OTHER; note = 2'-deoxy-2'-fluoroadenosine-3'-phosphate
  modified_base 12: mod_base = OTHER; note = 2'-O-methylguanosine-3'-phosphate
  modified_base 13: mod_base = OTHER; note = 2'-O-methyluridine-3'-phosphate
  modified_base 14: mod_base = OTHER; note = 2'-O-methylguanosine-3'-phosphate
  modified_base 15: mod_base = OTHER; note = 2'-O-methylguanosine-3'-phosphate
  modified_base 16: mod_base = OTHER; note = 2'-O-methylcytidine-3'-phosphate
  modified_base 17: mod_base = OTHER; note = 2'-O-methyluridine-3'-phosphate
  modified_base 18: mod_base = OTHER; note = 2'-O-methylcytidine-3'-phosphate
  modified_base 19: mod_base = OTHER; note = 2'-O-methylcytidine-3'-phosphorothioate
  modified_base 20: mod_base = OTHER; note = 2'-O-methyladenosine-3'-phosphorothioate
  modified_base 21: mod_base = OTHER; note = 2'-O-methyladenosine
acccacaaccagtggctccaa

SEQ ID NO: 4090 - RNA, 21 nt, synthetic construct
  source 1..21: mol_type = other RNA
  modified_base 1: mod_base = OTHER; note = 2'-O-methylguanosine-3'-phosphorothioate
  modified_base 2: mod_base = OTHER; note = 2'-O-methyladenosine-3'-phosphorothioate
  modified_base 3: mod_base = OTHER; note = 2'-O-methylcytidine-3'-phosphate
  modified_base 4: mod_base = OTHER; note = 2'-O-methylguanosine-3'-phosphate
  modified_base 5: mod_base = OTHER; note = 2'-O-methyladenosine-3'-phosphate
  modified_base 6: mod_base = OTHER; note = 2'-O-hexadecyl-cytidine-3'-phosphate
  modified_base 7: mod_base = OTHER; note = 2'-deoxy-2'-fluorocytidine-3'-phosphate
  modified_base 8: mod_base = OTHER; note = 2'-O-methyluridine-3'-phosphate
  modified_base 9: mod_base = OTHER; note = 2'-deoxy-2'-fluoroguanosine-3'-phosphate
  modified_base 10: mod_base = OTHER; note = 2'-deoxy-2'-fluoroguanosine-3'-phosphate
  modified_base 11: mod_base = OTHER; note = 2'-deoxy-2'-fluoroadenosine-3'-phosphate
  modified_base 12: mod_base = OTHER; note = 2'-O-methyluridine-3'-phosphate
  modified_base 13: mod_base = OTHER; note = 2'-O-methylcytidine-3'-phosphate
  modified_base 14: mod_base = OTHER; note = 2'-O-methylcytidine-3'-phosphate
  modified_base 15: mod_base = OTHER; note = 2'-O-methyluridine-3'-phosphate
  modified_base 16: mod_base = OTHER; note = 2'-O-methylcytidine-3'-phosphate
  modified_base 17: mod_base = OTHER; note = 2'-O-methyladenosine-3'-phosphate
  modified_base 18: mod_base = OTHER; note = 2'-O-methylcytidine-3'-phosphate
  modified_base 19: mod_base = OTHER; note = 2'-O-methyladenosine-3'-phosphorothioate
  modified_base 20: mod_base = OTHER; note = 2'-O-methylguanosine-3'-phosphorothioate
  modified_base 21: mod_base = OTHER; note = 2'-O-methyladenosine
gacgacctggatcctcacaga

SEQ ID NO: 4091 - RNA, 21 nt, synthetic construct
  source 1..21: mol_type = other RNA
  modified_base 1: mod_base = OTHER; note = 2'-O-methyluridine-3'-phosphorothioate
  modified_base 2: mod_base = OTHER; note = 2'-O-methylguanosine-3'-phosphorothioate
  modified_base 3: mod_base = OTHER; note = 2'-O-methyladenosine-3'-phosphate
  modified_base 4: mod_base = OTHER; note = 2'-O-methylcytidine-3'-phosphate
  modified_base 5: mod_base = OTHER; note = 2'-O-methylcytidine-3'-phosphate
  modified_base 6: mod_base = OTHER; note = 2'-O-hexadecyl-adenosine-3'-phosphate
  modified_base 7: mod_base = OTHER; note = 2'-deoxy-2'-fluorocytidine-3'-phosphate
  modified_base 8: mod_base = OTHER; note = 2'-O-methyladenosine-3'-phosphate
  modified_base 9: mod_base = OTHER; note = 2'-deoxy-2'-fluoroadenosine-3'-phosphate
  modified_base 10: mod_base = OTHER; note = 2'-deoxy-2'-fluorocytidine-3'-phosphate
  modified_base 11: mod_base = OTHER; note = 2'-deoxy-2'-fluoroadenosine-3'-phosphate
  modified_base 12: mod_base = OTHER; note = 2'-O-methylguanosine-3'-phosphate
  modified_base 13: mod_base = OTHER; note = 2'-O-methylcytidine-3'-phosphate
  modified_base 14: mod_base = OTHER; note = 2'-O-methylcytidine-3'-phosphate
  modified_base 15: mod_base = OTHER; note = 2'-O-methyladenosine-3'-phosphate
  modified_base 16: mod_base = OTHER; note = 2'-O-methylcytidine-3'-phosphate
  modified_base 17: mod_base = OTHER; note = 2'-O-methyluridine-3'-phosphate
  modified_base 18: mod_base = OTHER; note = 2'-O-methyladenosine-3'-phosphate
  modified_base 19: mod_base = OTHER; note = 2'-O-methylcytidine-3'-phosphorothioate
  modified_base 20: mod_base = OTHER; note = 2'-O-methylguanosine-3'-phosphorothioate
  modified_base 21: mod_base = OTHER; note = 2'-O-methyladenosine
tgaccacaacagccactacga

SEQ ID NO: 4092 - RNA, 21 nt, synthetic construct
  source 1..21: mol_type = other RNA
  modified_base 1: mod_base = OTHER; note = 2'-O-methyladenosine-3'-phosphorothioate
  modified_base 2: mod_base = OTHER; note = 2'-O-methyluridine-3'-phosphorothioate
  modified_base 3: mod_base = OTHER; note = 2'-O-methylcytidine-3'-phosphate
  modified_base 4: mod_base = OTHER; note = 2'-O-methylcytidine-3'-phosphate
  modified_base 5: mod_base = OTHER; note = 2'-O-methyladenosine-3'-phosphate
  modified_base 6: mod_base = OTHER; note = 2'-O-hexadecyl-cytidine-3'-phosphate
  modified_base 7: mod_base = OTHER; note = 2'-deoxy-2'-fluorouridine-3'-phosphate
  modified_base 8: mod_base = OTHER; note = 2'-O-methylguanosine-3'-phosphate
  modified_base 9: mod_base = OTHER; note = 2'-deoxy-2'-fluoroguanosine-3'-phosphate
  modified_base 10: mod_base = OTHER; note = 2'-deoxy-2'-fluoroadenosine-3'-phosphate
  modified_base 11: mod_base = OTHER; note = 2'-deoxy-2'-fluorouridine-3'-phosphate
  modified_base 12: mod_base = OTHER; note = 2'-O-methylcytidine-3'-phosphate
  modified_base 13: mod_base = OTHER; note = 2'-O-methylcytidine-3'-phosphate
  modified_base 14: mod_base = OTHER; note = 2'-O-methyladenosine-3'-phosphate
  modified_base 15: mod_base = OTHER; note = 2'-O-methylcytidine-3'-phosphate
  modified_base 16: mod_base = OTHER; note = 2'-O-methylguanosine-3'-phosphate
  modified_base 17: mod_base = OTHER; note = 2'-O-methylguanosine-3'-phosphate
  modified_base 18: mod_base = OTHER; note = 2'-O-methylcytidine-3'-phosphate
  modified_base 19: mod_base = OTHER; note = 2'-O-methylcytidine-3'-phosphorothioate
  modified_base 20: mod_base = OTHER; note = 2'-O-methyladenosine-3'-phosphorothioate
  modified_base 21: mod_base = OTHER; note = 2'-O-methyladenosine
atccactggatccacggccaa

SEQ ID NO: 4093 - RNA, 21 nt, synthetic construct
  source 1..21: mol_type = other RNA
  modified_base 1: mod_base = OTHER; note = 2'-O-methylcytidine-3'-phosphorothioate
  modified_base 2: mod_base = OTHER; note = 2'-O-methyluridine-3'-phosphorothioate
  modified_base 3: mod_base = OTHER; note = 2'-O-methylcytidine-3'-phosphate
  modified_base 4: mod_base = OTHER; note = 2'-O-methylcytidine-3'-phosphate
  modified_base 5: mod_base = OTHER; note = 2'-O-methylcytidine-3'-phosphate
  modified_base 6: mod_base = OTHER; note = 2'-O-hexadecyl-adenosine-3'-phosphate
  modified_base 7: mod_base = OTHER; note = 2'-deoxy-2'-fluoroadenosine-3'-phosphate
  modified_base 8: mod_base = OTHER; note = 2'-O-methyladenosine-3'-phosphate
  modified_base 9: mod_base = OTHER; note = 2'-deoxy-2'-fluoroguanosine-3'-phosphate
  modified_base 10: mod_base = OTHER; note = 2'-deoxy-2'-fluorouridine-3'-phosphate
  modified_base 11: mod_base = OTHER; note = 2'-deoxy-2'-fluoroguanosine-3'-phosphate
  modified_base 12: mod_base = OTHER; note = 2'-O-methylcytidine-3'-phosphate
  modified_base 13: mod_base = OTHER; note = 2'-O-methyluridine-3'-phosphate
  modified_base 14: mod_base = OTHER; note = 2'-O-methylguanosine-3'-phosphate
  modified_base 15: mod_base = OTHER; note = 2'-O-methyladenosine-3'-phosphate
  modified_base 16: mod_base = OTHER; note = 2'-O-methylcytidine-3'-phosphate
  modified_base 17: mod_base = OTHER; note = 2'-O-methylcytidine-3'-phosphate
  modified_base 18: mod_base = OTHER; note = 2'-O-methyladenosine-3'-phosphate
  modified_base 19: mod_base = OTHER; note = 2'-O-methylguanosine-3'-phosphorothioate
  modified_base 20: mod_base = OTHER; note = 2'-O-methylcytidine-3'-phosphorothioate
  modified_base 21: mod_base = OTHER; note = 2'-O-methyladenosine
ctcccaaagtgctgaccagca

SEQ ID NO: 4094 - RNA, 21 nt, synthetic construct
  source 1..21: mol_type = other RNA
  modified_base 1: mod_base = OTHER; note = 2'-O-methylcytidine-3'-phosphorothioate
  modified_base 2: mod_base = OTHER; note = 2'-O-methylcytidine-3'-phosphorothioate
  modified_base 3: mod_base = OTHER; note = 2'-O-methyladenosine-3'-phosphate
  modified_base 4: mod_base = OTHER; note = 2'-O-methylcytidine-3'-phosphate
  modified_base 5: mod_base = OTHER; note = 2'-O-methylcytidine-3'-phosphate
  modified_base 6: mod_base = OTHER; note = 2'-O-hexadecyl-adenosine-3'-phosphate
  modified_base 7: mod_base = OTHER; note = 2'-deoxy-2'-fluoroadenosine-3'-phosphate
  modified_base 8: mod_base = OTHER; note = 2'-O-methyladenosine-3'-phosphate
  modified_base 9: mod_base = OTHER; note = 2'-deoxy-2'-fluorouridine-3'-phosphate
  modified_base 10: mod_base = OTHER; note = 2'-deoxy-2'-fluorocytidine-3'-phosphate
  modified_base 11: mod_base = OTHER; note = 2'-deoxy-2'-fluorocytidine-3'-phosphate
  modified_base 12: mod_base = OTHER; note = 2'-O-methyladenosine-3'-phosphate
  modified_base 13: mod_base = OTHER; note = 2'-O-methylcytidine-3'-phosphate
  modified_base 14: mod_base = OTHER; note = 2'-O-methyladenosine-3'-phosphate
  modified_base 15: mod_base = OTHER; note = 2'-O-methylguanosine-3'-phosphate
  modified_base 16: mod_base = OTHER; note = 2'-O-methylcytidine-3'-phosphate
  modified_base 17: mod_base = OTHER; note = 2'-O-methyluridine-3'-phosphate
  modified_base 18: mod_base = OTHER; note = 2'-O-methyladenosine-3'-phosphate
  modified_base 19: mod_base = OTHER; note = 2'-O-methylcytidine-3'-phosphorothioate
  modified_base 20: mod_base = OTHER; note = 2'-O-methylcytidine-3'-phosphorothioate
  modified_base 21: mod_base = OTHER; note = 2'-O-methyladenosine
ccaccaaatccacagctacca

SEQ ID NO: 4095 - RNA, 21 nt, synthetic construct
  source 1..21: mol_type = other RNA
  modified_base 1: mod_base = OTHER; note = 2'-O-methylguanosine-3'-phosphorothioate
  modified_base 2: mod_base = OTHER; note = 2'-O-methylguanosine-3'-phosphorothioate
  modified_base 3: mod_base = OTHER; note = 2'-O-methylcytidine-3'-phosphate
  modified_base 4: mod_base = OTHER; note = 2'-O-methylcytidine-3'-phosphate
  modified_base 5: mod_base = OTHER; note = 2'-O-methyladenosine-3'-phosphate
  modified_base 6: mod_base = OTHER; note = 2'-O-hexadecyl-cytidine-3'-phosphate
  modified_base 7: mod_base = OTHER; note = 2'-deoxy-2'-fluorocytidine-3'-phosphate
  modified_base 8: mod_base = OTHER; note = 2'-O-methyladenosine-3'-phosphate
  modified_base 9: mod_base = OTHER; note = 2'-deoxy-2'-fluoroguanosine-3'-phosphate
  modified_base 10: mod_base = OTHER; note = 2'-deoxy-2'-fluorouridine-3'-phosphate
  modified_base 11: mod_base = OTHER; note = 2'-deoxy-2'-fluorouridine-3'-phosphate
  modified_base 12: mod_base = OTHER; note = 2'-O-methylcytidine-3'-phosphate
  modified_base 13: mod_base = OTHER; note = 2'-O-methylcytidine-3'-phosphate
  modified_base 14: mod_base = OTHER; note = 2'-O-methyladenosine-3'-phosphate
  modified_base 15: mod_base = OTHER; note = 2'-O-methylcytidine-3'-phosphate
  modified_base 16: mod_base = OTHER; note = 2'-O-methylguanosine-3'-phosphate
  modified_base 17: mod_base = OTHER; note = 2'-O-methyluridine-3'-phosphate
  modified_base 18: mod_base = OTHER; note = 2'-O-methylcytidine-3'-phosphate
  modified_base 19: mod_base = OTHER; note = 2'-O-methylcytidine-3'-phosphorothioate
  modified_base 20: mod_base = OTHER; note = 2'-O-methyladenosine-3'-phosphorothioate
  modified_base 21: mod_base = OTHER; note = 2'-O-methyladenosine
ggccaccagttccacgtccaa

SEQ ID NO: 4096 - RNA, 21 nt, synthetic construct
  source 1..21: mol_type = other RNA
  modified_base 1: mod_base = OTHER; note = 2'-O-methyluridine-3'-phosphorothioate
  modified_base 2: mod_base = OTHER; note = 2'-O-methylguanosine-3'-phosphorothioate
  modified_base 3: mod_base = OTHER; note = 2'-O-methyladenosine-3'-phosphate
  modified_base 4: mod_base = OTHER; note = 2'-O-methylguanosine-3'-phosphate
  modified_base 5: mod_base = OTHER; note = 2'-O-methylcytidine-3'-phosphate
  modified_base 6: mod_base = OTHER; note = 2'-O-hexadecyl-adenosine-3'-phosphate
  modified_base 7: mod_base = OTHER; note = 2'-deoxy-2'-fluorocytidine-3'-phosphate
  modified_base 8: mod_base = OTHER; note = 2'-O-methylcytidine-3'-phosphate
  modified_base 9: mod_base = OTHER; note = 2'-deoxy-2'-fluoroadenosine-3'-phosphate
  modified_base 10: mod_base = OTHER; note = 2'-deoxy-2'-fluorocytidine-3'-phosphate
  modified_base 11: mod_base = OTHER; note = 2'-deoxy-2'-fluoroguanosine-3'-phosphate
  modified_base 12: mod_base = OTHER; note = 2'-O-methylguanosine-3'-phosphate
  modified_base 13: mod_base = OTHER; note = 2'-O-methylcytidine-3'-phosphate
  modified_base 14: mod_base = OTHER; note = 2'-O-methylcytidine-3'-phosphate
  modified_base 15: mod_base = OTHER; note = 2'-O-methyladenosine-3'-phosphate
  modified_base 16: mod_base = OTHER; note = 2'-O-methylcytidine-3'-phosphate
  modified_base 17: mod_base = OTHER; note = 2'-O-methylguanosine-3'-phosphate
  modified_base 18: mod_base = OTHER; note = 2'-O-methyladenosine-3'-phosphate
  modified_base 19: mod_base = OTHER; note = 2'-O-methylcytidine-3'-phosphorothioate
  modified_base 20: mod_base = OTHER; note = 2'-O-methyladenosine-3'-phosphorothioate
  modified_base 21: mod_base = OTHER; note = 2'-O-methyladenosine
tgagcaccacggccacgacaa

SEQ ID NO: 4097 - RNA, 21 nt, synthetic construct
  source 1..21: mol_type = other RNA
  modified_base 1: mod_base = OTHER; note = 2'-O-methylcytidine-3'-phosphorothioate
  modified_base 2: mod_base = OTHER; note = 2'-O-methylcytidine-3'-phosphorothioate
  modified_base 3: mod_base = OTHER; note = 2'-O-methyladenosine-3'-phosphate
  modified_base 4: mod_base = OTHER; note = 2'-O-methylguanosine-3'-phosphate
  modified_base 5: mod_base = OTHER; note = 2'-O-methylguanosine-3'-phosphate
  modified_base 6: mod_base = OTHER; note = 2'-O-hexadecyl-guanosine-3'-phosphate
  modified_base 7: mod_base = OTHER; note = 2'-deoxy-2'-fluoroadenosine-3'-phosphate
  modified_base 8: mod_base = OTHER; note = 2'-O-methylcytidine-3'-phosphate
  modified_base 9: mod_base = OTHER; note = 2'-deoxy-2'-fluorouridine-3'-phosphate
  modified_base 10: mod_base = OTHER; note = 2'-deoxy-2'-fluoroguanosine-3'-phosphate
  modified_base 11: mod_base = OTHER; note = 2'-deoxy-2'-fluorocytidine-3'-phosphate
  modified_base 12: mod_base = OTHER; note = 2'-O-methyladenosine-3'-phosphate
  modified_base 13: mod_base = OTHER; note = 2'-O-methyladenosine-3'-phosphate
  modified_base 14: mod_base = OTHER; note = 2'-O-methylcytidine-3'-phosphate
  modified_base 15: mod_base = OTHER; note = 2'-O-methyluridine-3'-phosphate
  modified_base 16: mod_base = OTHER; note = 2'-O-methylguanosine-3'-phosphate
  modified_base 17: mod_base = OTHER; note = 2'-O-methylcytidine-3'-phosphate
  modified_base 18: mod_base = OTHER; note = 2'-O-methylcytidine-3'-phosphate
  modified_base 19: mod_base = OTHER; note = 2'-O-methylcytidine-3'-phosphorothioate
  modified_base 20: mod_base = OTHER; note = 2'-O-methyluridine-3'-phosphorothioate
  modified_base 21: mod_base = OTHER; note = 2'-O-methyladenosine
ccagggactgcaactgcccta

SEQ ID NO: 4098 - RNA, 21 nt, synthetic construct
  source 1..21: mol_type = other RNA
  modified_base 1: mod_base = OTHER; note = 2'-O-methylcytidine-3'-phosphorothioate
  modified_base 2: mod_base = OTHER; note = 2'-O-methylguanosine-3'-phosphorothioate
  modified_base 3: mod_base = OTHER; note = 2'-O-methylcytidine-3'-phosphate
  modified_base 4: mod_base = OTHER; note = 2'-O-methylcytidine-3'-phosphate
  modified_base 5: mod_base = OTHER; note = 2'-O-methyladenosine-3'-phosphate
  modified_base 6: mod_base = OTHER; note = 2'-O-hexadecyl-guanosine-3'-phosphate
  modified_base 7: mod_base = OTHER; note = 2'-deoxy-2'-fluoroadenosine-3'-phosphate
  modified_base 8: mod_base = OTHER; note = 2'-O-methylguanosine-3'-phosphate
  modified_base 9: mod_base = OTHER; note = 2'-deoxy-2'-fluorouridine-3'-phosphate
  modified_base 10: mod_base = OTHER; note = 2'-deoxy-2'-fluoroguanosine-3'-phosphate
  modified_base 11: mod_base = OTHER; note = 2'-deoxy-2'-fluorocytidine-3'-phosphate
  modified_base 12: mod_base = OTHER; note = 2'-O-methyluridine-3'-phosphate
  modified_base 13: mod_base = OTHER; note = 2'-O-methylguanosine-3'-phosphate
  modified_base 14: mod_base = OTHER; note = 2'-O-methyladenosine-3'-phosphate
  modified_base 15: mod_base = OTHER; note = 2'-O-methylcytidine-3'-phosphate
  modified_base 16: mod_base = OTHER; note = 2'-O-methylcytidine-3'-phosphate
  modified_base 17: mod_base = OTHER; note = 2'-O-methyladenosine-3'-phosphate
  modified_base 18: mod_base = OTHER; note = 2'-O-methylcytidine-3'-phosphate
  modified_base 19: mod_base = OTHER; note = 2'-O-methylcytidine-3'-phosphorothioate
  modified_base 20: mod_base = OTHER; note = 2'-O-methyladenosine-3'-phosphorothioate
  modified_base 21: mod_base = OTHER; note = 2'-O-methyladenosine
cgccagagtgctgaccaccaa

SEQ ID NO: 4099 - RNA, 21 nt, synthetic construct
  source 1..21: mol_type = other RNA
  modified_base 1: mod_base = OTHER; note = 2'-O-methylcytidine-3'-phosphorothioate
  modified_base 2: mod_base = OTHER; note = 2'-O-methyladenosine-3'-phosphorothioate
  modified_base 3: mod_base = OTHER; note = 2'-O-methylguanosine-3'-phosphate
  modified_base 4: mod_base = OTHER; note = 2'-O-methylguanosine-3'-phosphate
  modified_base 5: mod_base = OTHER; note = 2'-O-methylguanosine-3'-phosphate
  modified_base 6: mod_base = OTHER; note = 2'-O-hexadecyl-adenosine-3'-phosphate
  modified_base 7: mod_base = OTHER; note = 2'-deoxy-2'-fluorocytidine-3'-phosphate
  modified_base 8: mod_base = OTHER; note = 2'-O-methyladenosine-3'-phosphate
  modified_base 9: mod_base = OTHER; note = 2'-deoxy-2'-fluoroadenosine-3'-phosphate
  modified_base 10: mod_base = OTHER; note = 2'-deoxy-2'-fluorocytidine-3'-phosphate
  modified_base 11: mod_base = OTHER; note = 2'-deoxy-2'-fluoroadenosine-3'-phosphate
  modified_base 12: mod_base = OTHER; note = 2'-O-methylcytidine-3'-phosphate
  modified_base 13: mod_base = OTHER; note = 2'-O-methylcytidine-3'-phosphate
  modified_base 14: mod_base = OTHER; note = 2'-O-methylcytidine-3'-phosphate
  modified_base 15: mod_base = OTHER; note = 2'-O-methyladenosine-3'-phosphate
  modified_base 16: mod_base = OTHER; note = 2'-O-methyluridine-3'-phosphate
  modified_base 17: mod_base = OTHER; note = 2'-O-methylcytidine-3'-phosphate
  modified_base 18: mod_base = OTHER; note = 2'-O-methyladenosine-3'-phosphate
  modified_base 19: mod_base = OTHER; note = 2'-O-methylcytidine-3'-phosphorothioate
  modified_base 20: mod_base = OTHER; note = 2'-O-methylcytidine-3'-phosphorothioate
  modified_base 21: mod_base = OTHER; note = 2'-O-methyladenosine
cagggacaacacccatcacca

SEQ ID NO: 4100 - RNA, 21 nt, synthetic construct
  source 1..21: mol_type = other RNA
  modified_base 1: mod_base = OTHER; note = 2'-O-methylcytidine-3'-phosphorothioate
  modified_base 2: mod_base = OTHER; note = 2'-O-methyluridine-3'-phosphorothioate
  modified_base 3: mod_base = OTHER; note = 2'-O-methylcytidine-3'-phosphate
  modified_base 4: mod_base = OTHER; note = 2'-O-methylcytidine-3'-phosphate
  modified_base 5: mod_base = OTHER; note = 2'-O-methyladenosine-3'-phosphate
  modified_base 6: mod_base = OTHER; note = 2'-O-hexadecyl-adenosine-3'-phosphate
  modified_base 7: mod_base = OTHER; note = 2'-deoxy-2'-fluoroadenosine-3'-phosphate
  modified_base 8: mod_base = OTHER; note = 2'-O-methylguanosine-3'-phosphate
  modified_base 9: mod_base = OTHER; note = 2'-deoxy-2'-fluorocytidine-3'-phosphate
  modified_base 10: mod_base = OTHER; note = 2'-deoxy-2'-fluorocytidine-3'-phosphate
  modified_base 11: mod_base = OTHER; note = 2'-deoxy-2'-fluoroadenosine-3'-phosphate
  modified_base 12: mod_base = OTHER; note = 2'-O-methylcytidine-3'-phosphate
  modified_base 13: mod_base = OTHER; note = 2'-O-methyluridine-3'-phosphate
  modified_base 14: mod_base = OTHER; note = 2'-O-methyluridine-3'-phosphate
  modified_base 15: mod_base = OTHER; note = 2'-O-methylcytidine-3'-phosphate
  modified_base 16: mod_base = OTHER; note = 2'-O-methylcytidine-3'-phosphate
  modified_base 17: mod_base = OTHER; note = 2'-O-methyluridine-3'-phosphate
  modified_base 18: mod_base = OTHER; note = 2'-O-methylcytidine-3'-phosphate
  modified_base 19: mod_base = OTHER; note = 2'-O-methylcytidine-3'-phosphorothioate
  modified_base 20: mod_base = OTHER; note = 2'-O-methyluridine-3'-phosphorothioate
  modified_base 21: mod_base = OTHER; note = 2'-O-methyladenosine
ctccaaagccacttcctccta

SEQ ID NO: 4101 - RNA, 21 nt, synthetic construct
  source 1..21: mol_type = other RNA
  modified_base 1: mod_base = OTHER; note = 2'-O-methyluridine-3'-phosphorothioate
  modified_base 2: mod_base = OTHER; note = 2'-O-methylguanosine-3'-phosphorothioate
  modified_base 3: mod_base = OTHER; note = 2'-O-methylcytidine-3'-phosphate
  modified_base 4: mod_base = OTHER; note = 2'-O-methyluridine-3'-phosphate
  modified_base 5: mod_base = OTHER; note = 2'-O-methylguanosine-3'-phosphate
  modified_base 6: mod_base = OTHER; note = 2'-O-hexadecyl-adenosine-3'-phosphate
  modified_base 7: mod_base = OTHER; note = 2'-deoxy-2'-fluorocytidine-3'-phosphate
  modified_base 8: mod_base = OTHER; note = 2'-O-methyladenosine-3'-phosphate
  modified_base 9: mod_base = OTHER; note = 2'-deoxy-2'-fluoroadenosine-3'-phosphate
  modified_base 10: mod_base = OTHER; note = 2'-deoxy-2'-fluoroguanosine-3'-phosphate
  modified_base 11: mod_base = OTHER; note = 2'-deoxy-2'-fluorocytidine-3'-phosphate
  modified_base 12: mod_base = OTHER; note = 2'-O-methyladenosine-3'-phosphate
  modified_base 13: mod_base = OTHER; note = 2'-O-methylcytidine-3'-phosphate
  modified_base 14: mod_base = OTHER; note = 2'-O-methyladenosine-3'-phosphate
  modified_base 15: mod_base = OTHER; note = 2'-O-methylguanosine-3'-phosphate
  modified_base 16: mod_base = OTHER; note = 2'-O-methylcytidine-3'-phosphate
  modified_base 17: mod_base = OTHER; note = 2'-O-methylcytidine-3'-phosphate
  modified_base 18: mod_base = OTHER; note = 2'-O-methyladenosine-3'-phosphate
  modified_base 19: mod_base = OTHER; note = 2'-O-methylcytidine-3'-phosphorothioate
  modified_base 20: mod_base = OTHER; note = 2'-O-methyladenosine-3'-phosphorothioate
  modified_base 21: mod_base = OTHER; note = 2'-O-methyladenosine
tgctgacaagcacagccacaa

SEQ ID NO: 4102 - RNA, 21 nt, synthetic construct
  source 1..21: mol_type = other RNA
  modified_base 1: mod_base = OTHER; note = 2'-O-methylcytidine-3'-phosphorothioate
  modified_base 2: mod_base = OTHER; note = 2'-O-methyluridine-3'-phosphorothioate
  modified_base 3: mod_base = OTHER; note = 2'-O-methylcytidine-3'-phosphate
  modified_base 4: mod_base = OTHER; note = 2'-O-methylcytidine-3'-phosphate
  modified_base 5: mod_base = OTHER; note = 2'-O-methyladenosine-3'-phosphate
  modified_base 6: mod_base = OTHER; note = 2'-O-hexadecyl-cytidine-3'-phosphate
  modified_base 7: mod_base = OTHER; note = 2'-deoxy-2'-fluorocytidine-3'-phosphate
  modified_base 8: mod_base = OTHER; note = 2'-O-methylcytidine-3'-phosphate
  modified_base 9: mod_base = OTHER; note = 2'-deoxy-2'-fluorouridine-3'-phosphate
  modified_base 10: mod_base = OTHER; note = 2'-deoxy-2'-fluoroguanosine-3'-phosphate
  modified_base 11: mod_base = OTHER; note = 2'-deoxy-2'-fluorouridine-3'-phosphate
  modified_base 12: mod_base = OTHER; note = 2'-O-methylguanosine-3'-phosphate
  modified_base 13: mod_base = OTHER; note = 2'-O-methylguanosine-3'-phosphate
  modified_base 14: mod_base = OTHER; note = 2'-O-methyladenosine-3'-phosphate
  modified_base 15: mod_base = OTHER; note = 2'-O-methylcytidine-3'-phosphate
  modified_base 16: mod_base = OTHER; note = 2'-O-methylcytidine-3'-phosphate
  modified_base 17: mod_base = OTHER; note = 2'-O-methyladenosine-3'-phosphate
  modified_base 18: mod_base = OTHER; note = 2'-O-methylcytidine-3'-phosphate
  modified_base 19: mod_base = OTHER; note = 2'-O-methylguanosine-3'-phosphorothioate
  modified_base 20: mod_base = OTHER; note = 2'-O-methyluridine-3'-phosphorothioate
  modified_base 21: mod_base = OTHER; note = 2'-O-methyladenosine
ctccaccctgtggaccacgta

SEQ ID NO: 4103 - RNA, 21 nt, synthetic construct
  source 1..21: mol_type = other RNA
  modified_base 1: mod_base = OTHER; note = 2'-O-methylcytidine-3'-phosphorothioate
  modified_base 2: mod_base = OTHER; note = 2'-O-methylcytidine-3'-phosphorothioate
  modified_base 3: mod_base = OTHER; note = 2'-O-methylcytidine-3'-phosphate
  modified_base 4: mod_base = OTHER; note = 2'-O-methyladenosine-3'-phosphate
  modified_base 5: mod_base = OTHER; note = 2'-O-methylguanosine-3'-phosphate
  modified_base 6: mod_base = OTHER; note = 2'-O-hexadecyl-cytidine-3'-phosphate
  modified_base 7: mod_base = OTHER; note = 2'-deoxy-2'-fluoroadenosine-3'-phosphate
  modified_base 8: mod_base = OTHER; note = 2'-O-methylcytidine-3'-phosphate
  modified_base 9: mod_base = OTHER; note = 2'-deoxy-2'-fluoroadenosine-3'-phosphate
  modified_base 10: mod_base = OTHER; note = 2'-deoxy-2'-fluoroguanosine-3'-phosphate
  modified_base 11: mod_base = OTHER; note = 2'-deoxy-2'-fluoroadenosine-3'-phosphate
  modified_base 12: mod_base = OTHER; note = 2'-O-methylcytidine-3'-phosphate
  modified_base 13: mod_base = OTHER; note = 2'-O-methylcytidine-3'-phosphate
  modified_base 14: mod_base = OTHER; note = 2'-O-methyladenosine-3'-phosphate
  modified_base 15: mod_base = OTHER; note = 2'-O-methylcytidine-3'-phosphate
  modified_base 16: mod_base = OTHER; note = 2'-O-methylcytidine-3'-phosphate
  modified_base 17: mod_base = OTHER; note = 2'-O-methyladenosine-3'-phosphate
  modified_base 18: mod_base = OTHER; note = 2'-O-methylcytidine-3'-phosphate
  modified_base 19: mod_base = OTHER; note = 2'-O-methyladenosine-3'-phosphorothioate
  modified_base 20: mod_base = OTHER; note = 2'-O-methylcytidine-3'-phosphorothioate
  modified_base 21: mod_base = OTHER; note = 2'-O-methyladenosine
cccagcacagaccaccacaca

SEQ ID NO: 4104 - RNA, 21 nt, synthetic construct
  source 1..21: mol_type = other RNA
  modified_base 1: mod_base = OTHER; note = 2'-O-methylguanosine-3'-phosphorothioate
  modified_base 2: mod_base = OTHER; note = 2'-O-methyluridine-3'-phosphorothioate
  modified_base 3: mod_base = OTHER; note = 2'-O-methylcytidine-3'-phosphate
  modified_base 4: mod_base = OTHER; note = 2'-O-methylcytidine-3'-phosphate
  modified_base 5: mod_base = OTHER; note = 2'-O-methyladenosine-3'-phosphate
  modified_base 6: mod_base = OTHER; note = 2'-O-hexadecyl-cytidine-3'-phosphate
  modified_base 7: mod_base = OTHER; note = 2'-deoxy-2'-fluorocytidine-3'-phosphate
  modified_base 8: mod_base = OTHER; note = 2'-O-methyladenosine-3'-phosphate
  modified_base 9: mod_base = OTHER; note = 2'-deoxy-2'-fluorouridine-3'-phosphate
  modified_base 10: mod_base = OTHER; note = 2'-deoxy-2'-fluoroguanosine-3'-phosphate
  modified_base 11: mod_base = OTHER; note = 2'-deoxy-2'-fluorouridine-3'-phosphate
  modified_base 12: mod_base = OTHER; note = 2'-O-methylcytidine-3'-phosphate
  modified_base 13: mod_base = OTHER; note = 2'-O-methylcytidine-3'-phosphate
  modified_base 14: mod_base = OTHER; note = 2'-O-methyladenosine-3'-phosphate
  modified_base 15: mod_base = OTHER; note = 2'-O-methylcytidine-3'-phosphate
  modified_base 16: mod_base = OTHER; note = 2'-O-methyladenosine-3'-phosphate
  modified_base 17: mod_base = OTHER; note = 2'-O-methyladenosine-3'-phosphate
  modified_base 18: mod_base = OTHER; note = 2'-O-methyluridine-3'-phosphate
  modified_base 19: mod_base = OTHER; note = 2'-O-methylcytidine-3'-phosphorothioate
  modified_base 20: mod_base = OTHER; note = 2'-O-methylcytidine-3'-phosphorothioate
  modified_base 21: mod_base = OTHER; note = 2'-O-methyladenosine
gtccaccatgtccacaatcca

SEQ ID NO: 4105 - RNA, 21 nt, synthetic construct
  source 1..21: mol_type = other RNA
  modified_base 1: mod_base = OTHER; note = 2'-O-methylcytidine-3'-phosphorothioate
  modified_base 2: mod_base = OTHER; note = 2'-O-methyluridine-3'-phosphorothioate
  modified_base 3: mod_base = OTHER; note = 2'-O-methylcytidine-3'-phosphate
  modified_base 4: mod_base = OTHER; note = 2'-O-methylcytidine-3'-phosphate
  modified_base 5: mod_base = OTHER; note = 2'-O-methyluridine-3'-phosphate
  modified_base 6: mod_base = OTHER; note = 2'-O-hexadecyl-cytidine-3'-phosphate
  modified_base 7: mod_base = OTHER; note = 2'-deoxy-2'-fluorouridine-3'-phosphate
  modified_base 8: mod_base = OTHER; note = 2'-O-methyladenosine-3'-phosphate
  modified_base 9: mod_base = OTHER; note = 2'-deoxy-2'-fluorocytidine-3'-phosphate
  modified_base 10: mod_base = OTHER; note = 2'-deoxy-2'-fluorouridine-3'-phosphate
  modified_base 11: mod_base = OTHER; note = 2'-deoxy-2'-fluorocytidine-3'-phosphate
  modified_base 12: mod_base = OTHER; note = 2'-O-methylcytidine-3'-phosphate
  modified_base 13: mod_base = OTHER; note = 2'-O-methyladenosine-3'-phosphate
  modified_base 14: mod_base = OTHER; note = 2'-O-methylguanosine-3'-phosphate
  modified_base 15: mod_base = OTHER; note = 2'-O-methyladenosine-3'-phosphate
  modified_base 16: mod_base = OTHER; note = 2'-O-methylguanosine-3'-phosphate
  modified_base 17: mod_base = OTHER; note = 2'-O-methyladenosine-3'-phosphate
  modified_base 18: mod_base = OTHER; note = 2'-O-methylcytidine-3'-phosphate
  modified_base 19: mod_base = OTHER; note = 2'-O-methylcytidine-3'-phosphorothioate
  modified_base 20: mod_base = OTHER; note = 2'-O-methyladenosine-3'-phosphorothioate
  modified_base 21: mod_base = OTHER; note = 2'-O-methyladenosine
ctcctctactccagagaccaa

SEQ ID NO: 4106 - RNA, 21 nt, synthetic construct
  source 1..21: mol_type = other RNA
  modified_base 1: mod_base = OTHER; note = 2'-O-methylcytidine-3'-phosphorothioate
  modified_base 2: mod_base = OTHER; note = 2'-O-methyluridine-3'-phosphorothioate
  modified_base 3: mod_base = OTHER; note = 2'-O-methylcytidine-3'-phosphate
  modified_base 4: mod_base = OTHER; note = 2'-O-methylcytidine-3'-phosphate
  modified_base 5: mod_base = OTHER; note = 2'-O-methyladenosine-3'-phosphate
  modified_base 6: mod_base = OTHER; note = 2'-O-hexadecyl-cytidine-3'-phosphate
  modified_base 7: mod_base = OTHER; note = 2'-deoxy-2'-fluoroadenosine-3'-phosphate
  modified_base 8: mod_base = OTHER; note = 2'-O-methylguanosine-3'-phosphate
  modified_base 9: mod_base = OTHER; note = 2'-deoxy-2'-fluorouridine-3'-phosphate
  modified_base 10: mod_base = OTHER; note = 2'-deoxy-2'-fluoroguanosine-3'-phosphate
  modified_base 11: mod_base = OTHER; note = 2'-deoxy-2'-fluorocytidine-3'-phosphate
  modified_base 12: mod_base = OTHER; note = 2'-O-methyluridine-3'-phosphate
  modified_base 13: mod_base = OTHER; note = 2'-O-methylguanosine-3'-phosphate
  modified_base 14: mod_base = OTHER; note = 2'-O-methyladenosine-3'-phosphate
  modified_base 15: mod_base = OTHER; note = 2'-O-methylcytidine-3'-phosphate
  modified_base 16: mod_base = OTHER; note = 2'-O-methylcytidine-3'-phosphate
  modified_base 17: mod_base = OTHER; note = 2'-O-methyladenosine-3'-phosphate
  modified_base 18: mod_base = OTHER; note = 2'-O-methylcytidine-3'-phosphate
  modified_base 19: mod_base = OTHER; note = 2'-O-methylcytidine-3'-phosphorothioate
  modified_base 20: mod_base = OTHER; note = 2'-O-methyladenosine-3'-phosphorothioate
  modified_base 21: mod_base = OTHER; note = 2'-O-methyladenosine
ctccacagtgctgaccaccaa

SEQ ID NO: 4107 - RNA, 21 nt, synthetic construct
  source 1..21: mol_type = other RNA
  modified_base 1: mod_base = OTHER; note = 2'-O-methylguanosine-3'-phosphorothioate
  modified_base 2: mod_base = OTHER; note = 2'-O-methylguanosine-3'-phosphorothioate
  modified_base 3: mod_base = OTHER; note = 2'-O-methylcytidine-3'-phosphate
  modified_base 4: mod_base = OTHER; note = 2'-O-methylcytidine-3'-phosphate
  modified_base 5: mod_base = OTHER; note = 2'-O-methyladenosine-3'-phosphate
  modified_base 6: mod_base = OTHER; note = 2'-O-hexadecyl-cytidine-3'-phosphate
  modified_base 7: mod_base = OTHER; note = 2'-deoxy-2'-fluorocytidine-3'-phosphate
  modified_base 8: mod_base = OTHER; note = 2'-O-methyladenosine-3'-phosphate
  modified_base 9: mod_base = OTHER; note = 2'-deoxy-2'-fluoroadenosine-3'-phosphate
  modified_base 10: mod_base = OTHER; note = 2'-deoxy-2'-fluorouridine-3'-phosphate
  modified_base 11: mod_base = OTHER; note = 2'-deoxy-2'-fluorouridine-3'-phosphate
  modified_base 12: mod_base = OTHER; note = 2'-O-methylcytidine-3'-phosphate
  modified_base 13: mod_base = OTHER; note = 2'-O-methylcytidine-3'-phosphate
  modified_base 14: mod_base = OTHER; note = 2'-O-methyladenosine-3'-phosphate
  modified_base 15: mod_base = OTHER; note = 2'-O-methylcytidine-3'-phosphate
  modified_base 16: mod_base = OTHER; note = 2'-O-methylguanosine-3'-phosphate
  modified_base 17: mod_base = OTHER; note = 2'-O-methylguanosine-3'-phosphate
  modified_base 18: mod_base = OTHER; note = 2'-O-methylcytidine-3'-phosphate
  modified_base 19: mod_base = OTHER; note = 2'-O-methylcytidine-3'-phosphorothioate
  modified_base 20: mod_base = OTHER; note = 2'-O-methyladenosine-3'-phosphorothioate
  modified_base 21: mod_base = OTHER; note = 2'-O-methyladenosine
ggccaccaattccacggccaa

SEQ ID NO: 4108 - RNA, 21 nt, synthetic construct
  source 1..21: mol_type = other RNA
  modified_base 1: mod_base = OTHER; note = 2'-O-methyluridine-3'-phosphorothioate
  modified_base 2: mod_base = OTHER; note = 2'-O-methylguanosine-3'-phosphorothioate
  modified_base 3: mod_base = OTHER; note = 2'-O-methyladenosine-3'-phosphate
  modified_base 4: mod_base = OTHER; note = 2'-O-methylcytidine-3'-phosphate
  modified_base 5: mod_base = OTHER; note = 2'-O-methylcytidine-3'-phosphate
  modified_base 6: mod_base = OTHER; note = 2'-O-hexadecyl-adenosine-3'-phosphate
  modified_base 7: mod_base = OTHER; note = 2'-deoxy-2'-fluorocytidine-3'-phosphate
  modified_base 8: mod_base = OTHER; note = 2'-O-methyladenosine-3'-phosphate
  modified_base 9: mod_base = OTHER; note = 2'-deoxy-2'-fluoroadenosine-3'-phosphate
  modified_base 10: mod_base = OTHER; note = 2'-deoxy-2'-fluorocytidine-3'-phosphate
  modified_base 11: mod_base = OTHER; note = 2'-deoxy-2'-fluoroadenosine-3'-phosphate
  modified_base 12: mod_base = OTHER; note = 2'-O-methylguanosine-3'-phosphate
  modified_base 13: mod_base = OTHER; note = 2'-O-methylcytidine-3'-phosphate
  modified_base 14: mod_base = OTHER; note = 2'-O-methylcytidine-3'-phosphate
  modified_base 15: mod_base = OTHER; note = 2'-O-methyladenosine-3'-phosphate
  modified_base 16: mod_base = OTHER; note = 2'-O-methylcytidine-3'-phosphate
  modified_base 17: mod_base = OTHER; note = 2'-O-methyluridine-3'-phosphate
  modified_base 18: mod_base = OTHER; note = 2'-O-methyladenosine-3'-phosphate
  modified_base 19: mod_base = OTHER; note = 2'-O-methylcytidine-3'-phosphorothioate
  modified_base 20: mod_base = OTHER; note = 2'-O-methyladenosine-3'-phosphorothioate
  modified_base 21: mod_base = OTHER; note = 2'-O-methyladenosine
tgaccacaacagccactacaa

SEQ ID NO: 4109 - RNA, 21 nt, synthetic construct
  source 1..21: mol_type = other RNA
  modified_base 1: mod_base = OTHER; note = 2'-O-methyluridine-3'-phosphorothioate
  modified_base 2: mod_base = OTHER; note = 2'-O-methylguanosine-3'-phosphorothioate
  modified_base 3: mod_base = OTHER; note = 2'-O-methylguanosine-3'-phosphate
  modified_base 4: mod_base = OTHER; note = 2'-O-methyladenosine-3'-phosphate
  modified_base 5: mod_base = OTHER; note = 2'-O-methyluridine-3'-phosphate
  modified_base 6: mod_base = OTHER; note = 2'-O-hexadecyl-cytidine-3'-phosphate
  modified_base 7: mod_base = OTHER; note = 2'-deoxy-2'-fluorocytidine-3'-phosphate
  modified_base 8: mod_base = OTHER; note = 2'-O-methyladenosine-3'-phosphate
  modified_base 9: mod_base = OTHER; note = 2'-deoxy-2'-fluorocytidine-3'-phosphate
  modified_base 10: mod_base = OTHER; note = 2'-deoxy-2'-fluoroguanosine-3'-phosphate
  modified_base 11: mod_base = OTHER; note = 2'-deoxy-2'-fluoroguanosine-3'-phosphate
  modified_base 12: mod_base = OTHER; note = 2'-O-methylcytidine-3'-phosphate
  modified_base 13: mod_base = OTHER; note = 2'-O-methylcytidine-3'-phosphate
  modified_base 14: mod_base = OTHER; note = 2'-O-methyladenosine-3'-phosphate
  modified_base 15: mod_base = OTHER; note = 2'-O-methylcytidine-3'-phosphate
  modified_base 16: mod_base = OTHER; note = 2'-O-methylcytidine-3'-phosphate
  modified_base 17: mod_base = OTHER; note = 2'-O-methylcytidine-3'-phosphate
  modified_base 18: mod_base = OTHER; note = 2'-O-methyluridine-3'-phosphate
  modified_base 19: mod_base = OTHER; note = 2'-O-methylguanosine-3'-phosphorothioate
  modified_base 20: mod_base = OTHER; note = 2'-O-methyluridine-3'-phosphorothioate
  modified_base 21: mod_base = OTHER; note = 2'-O-methyladenosine
tggatccacggccaccctgta

SEQ ID NO: 4110 - RNA, 21 nt, synthetic construct
  source 1..21: mol_type = other RNA
  modified_base 1: mod_base = OTHER; note = 2'-O-methylguanosine-3'-phosphorothioate
  modified_base 2: mod_base = OTHER; note = 2'-O-methyladenosine-3'-phosphorothioate
  modified_base 3: mod_base = OTHER; note = 2'-O-methylguanosine-3'-phosphate
  modified_base 4: mod_base = OTHER; note = 2'-O-methylcytidine-3'-phosphate
  modified_base 5: mod_base = OTHER; note = 2'-O-methyladenosine-3'-phosphate
  modified_base 6: mod_base = OTHER; note = 2'-O-hexadecyl-cytidine-3'-phosphate
  modified_base 7: mod_base = OTHER; note = 2'-deoxy-2'-fluorouridine-3'-phosphate
  modified_base 8: mod_base = OTHER; note = 2'-O-methyladenosine-3'-phosphate
  modified_base 9: mod_base = OTHER; note = 2'-deoxy-2'-fluorouridine-3'-phosphate
  modified_base 10: mod_base = OTHER; note = 2'-deoxy-2'-fluoroadenosine-3'-phosphate
  modified_base 11: mod_base = OTHER; note = 2'-deoxy-2'-fluoroguanosine-3'-phosphate
  modified_base 12: mod_base = OTHER; note = 2'-O-methylcytidine-3'-phosphate
  modified_base 13: mod_base = OTHER; note = 2'-O-methylcytidine-3'-phosphate
  modified_base 14: mod_base = OTHER; note = 2'-O-methyladenosine-3'-phosphate
  modified_base 15: mod_base = OTHER; note = 2'-O-methylcytidine-3'-phosphate
  modified_base 16: mod_base = OTHER; note = 2'-O-methylcytidine-3'-phosphate
  modified_base 17: mod_base = OTHER; note = 2'-O-methylguanosine-3'-phosphate
  modified_base 18: mod_base = OTHER; note = 2'-O-methyluridine-3'-phosphate
  modified_base 19: mod_base = OTHER; note = 2'-O-methylguanosine-3'-phosphorothioate
  modified_base 20: mod_base = OTHER; note = 2'-O-methyladenosine-3'-phosphorothioate
  modified_base 21: mod_base = OTHER; note = 2'-O-methyladenosine
gagcactatagccaccgtgaa

SEQ ID NO: 4111 - RNA, 21 nt, synthetic construct
  source 1..21: mol_type = other RNA
  modified_base 1: mod_base = OTHER; note = 2'-O-methylcytidine-3'-phosphorothioate
  modified_base 2: mod_base = OTHER; note = 2'-O-methylcytidine-3'-phosphorothioate
  modified_base 3: mod_base = OTHER; note = 2'-O-methyladenosine-3'-phosphate
  modified_base 4: mod_base = OTHER; note = 2'-O-methylcytidine-3'-phosphate
  modified_base 5: mod_base = OTHER; note = 2'-O-methyluridine-3'-phosphate
  modified_base 6: mod_base = OTHER; note = 2'-O-hexadecyl-cytidine-3'-phosphate
  modified_base 7: mod_base = OTHER; note = 2'-deoxy-2'-fluorouridine-3'-phosphate
  modified_base 8: mod_base = OTHER; note = 2'-O-methylguanosine-3'-phosphate
  modified_base 9: mod_base = OTHER; note = 2'-deoxy-2'-fluoroguanosine-3'-phosphate
  modified_base 10: mod_base = OTHER; note = 2'-deoxy-2'-fluoroguanosine-3'-phosphate
  modified_base 11: mod_base = OTHER; note = 2'-deoxy-2'-fluoroadenosine-3'-phosphate
  modified_base 12: mod_base = OTHER; note = 2'-O-methyladenosine-3'-phosphate
  modified_base 13: mod_base = OTHER; note = 2'-O-methylcytidine-3'-phosphate
  modified_base 14: mod_base = OTHER; note = 2'-O-methyladenosine-3'-phosphate
  modified_base 15: mod_base = OTHER; note = 2'-O-methylguanosine-3'-phosphate
  modified_base 16: mod_base = OTHER; note = 2'-O-methylcytidine-3'-phosphate
  modified_base 17: mod_base = OTHER; note = 2'-O-methyluridine-3'-phosphate
  modified_base 18: mod_base = OTHER; note = 2'-O-methylcytidine-3'-phosphate
  modified_base 19: mod_base = OTHER; note = 2'-O-methyladenosine-3'-phosphorothioate
  modified_base 20: mod_base = OTHER; note = 2'-O-methylcytidine-3'-phosphorothioate
  modified_base 21: mod_base = OTHER; note = 2'-O-methyladenosine
ccactctgggaacagctcaca

SEQ ID NO: 4112 - RNA, 21 nt, synthetic construct
  source 1..21: mol_type = other RNA
  modified_base 1: mod_base = OTHER; note = 2'-O-methylcytidine-3'-phosphorothioate
  modified_base 2: mod_base = OTHER; note = 2'-O-methyladenosine-3'-phosphorothioate
  modified_base 3: mod_base = OTHER; note = 2'-O-methyluridine-3'-phosphate
  modified_base 4: mod_base = OTHER; note = 2'-O-methylguanosine-3'-phosphate
  modified_base 5: mod_base = OTHER; note = 2'-O-methylguanosine-3'-phosphate
  modified_base 6: mod_base = OTHER; note = 2'-O-hexadecyl-cytidine-3'-phosphate
  modified_base 7: mod_base = OTHER; note = 2'-deoxy-2'-fluorocytidine-3'-phosphate
  modified_base 8: mod_base = OTHER; note = 2'-O-methyladenosine-3'-phosphate
  modified_base 9: mod_base = OTHER; note = 2'-deoxy-2'-fluorocytidine-3'-phosphate
  modified_base 10: mod_base = OTHER; note = 2'-deoxy-2'-fluorouridine-3'-phosphate
  modified_base 11: mod_base = OTHER; note = 2'-deoxy-2'-fluoroadenosine-3'-phosphate
  modified_base 12: mod_base = OTHER; note = 2'-O-methyluridine-3'-phosphate
  modified_base 13: mod_base = OTHER; note = 2'-O-methylguanosine-3'-phosphate
  modified_base 14: mod_base = OTHER; note = 2'-O-methylcytidine-3'-phosphate
  modified_base 15: mod_base = OTHER; note = 2'-O-methylcytidine-3'-phosphate
  modified_base 16: mod_base = OTHER; note = 2'-O-methylcytidine-3'-phosphate
  modified_base 17: mod_base = OTHER; note = 2'-O-methyladenosine-3'-phosphate
  modified_base 18: mod_base = OTHER; note = 2'-O-methylcytidine-3'-phosphate
  modified_base 19: mod_base = OTHER; note = 2'-O-methyladenosine-3'-phosphorothioate
  modified_base 20: mod_base = OTHER; note = 2'-O-methylguanosine-3'-phosphorothioate
  modified_base 21: mod_base = OTHER; note = 2'-O-methyladenosine
catggccactatgcccacaga

SEQ ID NO: 4113 - RNA, 21 nt, synthetic construct
  source 1..21: mol_type = other RNA
  modified_base 1: mod_base = OTHER; note = 2'-O-methyluridine-3'-phosphorothioate
  modified_base 2: mod_base = OTHER; note = 2'-O-methylguanosine-3'-phosphorothioate
  modified_base 3: mod_base = OTHER; note = 2'-O-methylcytidine-3'-phosphate
  modified_base 4: mod_base = OTHER; note = 2'-O-methylcytidine-3'-phosphate
  modified_base 5: mod_base = OTHER; note = 2'-O-methyluridine-3'-phosphate
  modified_base 6: mod_base = OTHER; note = 2'-O-hexadecyl-cytidine-3'-phosphate
  modified_base 7: mod_base = OTHER; note = 2'-deoxy-2'-fluorocytidine-3'-phosphate
  modified_base 8: mod_base = OTHER; note = 2'-O-methyladenosine-3'-phosphate
  modified_base 9: mod_base = OTHER; note = 2'-deoxy-2'-fluorocytidine-3'-phosphate
  modified_base 10: mod_base = OTHER; note = 2'-deoxy-2'-fluoroguanosine-3'-phosphate
  modified_base 11: mod_base = OTHER; note = 2'-deoxy-2'-fluoroguanosine-3'-phosphate
  modified_base 12: mod_base = OTHER; note = 2'-O-methyluridine-3'-phosphate
  modified_base 13: mod_base = OTHER; note = 2'-O-methyluridine-3'-phosphate
  modified_base 14: mod_base = OTHER; note = 2'-O-methylcytidine-3'-phosphate
  modified_base 15: mod_base = OTHER; note = 2'-O-methylcytidine-3'-phosphate
  modified_base 16: mod_base = OTHER; note = 2'-O-methylcytidine-3'-phosphate
  modified_base 17: mod_base = OTHER; note = 2'-O-methyladenosine-3'-phosphate
  modified_base 18: mod_base = OTHER; note = 2'-O-methylguanosine-3'-phosphate
  modified_base 19: mod_base = OTHER; note = 2'-O-methylcytidine-3'-phosphorothioate
  modified_base 20: mod_base = OTHER; note = 2'-O-methyluridine-3'-phosphorothioate
  modified_base 21: mod_base = OTHER; note = 2'-O-methyladenosine
tgcctccacggttcccagcta

SEQ ID NO: 4114 - RNA, 21 nt, synthetic construct
  source 1..21: mol_type = other RNA
  modified_base 1: mod_base = OTHER; note = 2'-O-methylguanosine-3'-phosphorothioate
  modified_base 2: mod_base = OTHER; note = 2'-O-methylcytidine-3'-phosphorothioate
  modified_base 3: mod_base = OTHER; note = 2'-O-methylcytidine-3'-phosphate
  modified_base 4: mod_base = OTHER; note = 2'-O-methyladenosine-3'-phosphate
  modified_base 5: mod_base = OTHER; note = 2'-O-methyladenosine-3'-phosphate
  modified_base 6: mod_base = OTHER; note = 2'-O-hexadecyl-cytidine-3'-phosphate
  modified_base 7: mod_base = OTHER; note = 2'-deoxy-2'-fluorocytidine-3'-phosphate
  modified_base 8: mod_base = OTHER; note = 2'-O-methyluridine-3'-phosphate
  modified_base 9: mod_base = OTHER; note = 2'-deoxy-2'-fluorouridine-3'-phosphate
  modified_base 10: mod_base = OTHER; note = 2'-deoxy-2'-fluorocytidine-3'-phosphate
  modified_base 11: mod_base = OTHER; note = 2'-deoxy-2'-fluoroadenosine-3'-phosphate
  modified_base 12: mod_base = OTHER; note = 2'-O-methylguanosine-3'-phosphate
  modified_base 13: mod_base = OTHER; note = 2'-O-methylcytidine-3'-phosphate
  modified_base 14: mod_base = OTHER; note = 2'-O-methylguanosine-3'-phosphate
  modified_base 15: mod_base = OTHER; note = 2'-O-methyluridine-3'-phosphate
  modified_base 16: mod_base = OTHER; note = 2'-O-methylguanosine-3'-phosphate
  modified_base 17: mod_base = OTHER; note = 2'-O-methyluridine-3'-phosphate
  modified_base 18: mod_base = OTHER; note = 2'-O-methylcytidine-3'-phosphate
  modified_base 19: mod_base = OTHER; note = 2'-O-methylcytidine-3'-phosphorothioate
  modified_base 20: mod_base = OTHER; note = 2'-O-methyladenosine-3'-phosphorothioate
  modified_base 21: mod_base = OTHER; note = 2'-O-methyladenosine
gccaaccttcagcgtgtccaa

SEQ ID NO: 4115 - RNA, 21 nt, synthetic construct
  source 1..21: mol_type = other RNA
  modified_base 1: mod_base = OTHER; note = 2'-O-methyluridine-3'-phosphorothioate
  modified_base 2: mod_base = OTHER; note = 2'-O-methylcytidine-3'-phosphorothioate
  modified_base 3: mod_base = OTHER; note = 2'-O-methylcytidine-3'-phosphate
  modified_base 4: mod_base = OTHER; note = 2'-O-methyluridine-3'-phosphate
  modified_base 5: mod_base = OTHER; note = 2'-O-methylcytidine-3'-phosphate
  modified_base 6: mod_base = OTHER; note = 2'-O-hexadecyl-cytidine-3'-phosphate
  modified_base 7: mod_base = OTHER; note = 2'-deoxy-2'-fluorouridine-3'-phosphate
  modified_base 8: mod_base = OTHER; note = 2'-O-methylcytidine-3'-phosphate
  modified_base 9: mod_base = OTHER; note = 2'-deoxy-2'-fluoroadenosine-3'-phosphate
  modified_base 10: mod_base = OTHER; note = 2'-deoxy-2'-fluoroguanosine-3'-phosphate
  modified_base 11: mod_base = OTHER; note = 2'-deoxy-2'-fluorouridine-3'-phosphate
  modified_base 12: mod_base = OTHER; note = 2'-O-methylcytidine-3'-phosphate
  modified_base 13: mod_base = OTHER; note = 2'-O-methylcytidine-3'-phosphate
  modified_base 14: mod_base = OTHER; note = 2'-O-methyluridine-3'-phosphate
  modified_base 15: mod_base = OTHER; note = 2'-O-methylcytidine-3'-phosphate
  modified_base 16: mod_base = OTHER; note = 2'-O-methyladenosine-3'-phosphate
  modified_base 17: mod_base = OTHER; note = 2'-O-methylcytidine-3'-phosphate
  modified_base 18: mod_base = OTHER; note = 2'-O-methylcytidine-3'-phosphate
  modified_base 19: mod_base = OTHER; note = 2'-O-methyladenosine-3'-phosphorothioate
  modified_base 20: mod_base = OTHER; note = 2'-O-methylcytidine-3'-phosphorothioate
  modified_base 21: mod_base = OTHER; note = 2'-O-methyladenosine
tcctcctcagtcctcaccaca

SEQ ID NO: 4116 - RNA, 21 nt, synthetic construct
  source 1..21: mol_type = other RNA
  modified_base 1: mod_base = OTHER; note = 2'-O-methyluridine-3'-phosphorothioate
  modified_base 2: mod_base = OTHER; note = 2'-O-methylcytidine-3'-phosphorothioate
  modified_base 3: mod_base = OTHER; note = 2'-O-methylcytidine-3'-phosphate
  modified_base 4: mod_base = OTHER; note = 2'-O-methylcytidine-3'-phosphate
  modified_base 5: mod_base = OTHER; note = 2'-O-methyladenosine-3'-phosphate
  modified_base 6: mod_base = OTHER; note = 2'-O-hexadecyl-cytidine-3'-phosphate
  modified_base 7: mod_base = OTHER; note = 2'-deoxy-2'-fluorouridine-3'-phosphate
  modified_base 8: mod_base = OTHER; note = 2'-O-methyluridine-3'-phosphate
  modified_base 9: mod_base = OTHER; note = 2'-deoxy-2'-fluorocytidine-3'-phosphate
  modified_base 10: mod_base = OTHER; note = 2'-deoxy-2'-fluorouridine-3'-phosphate
  modified_base 11: mod_base = OTHER; note = 2'-deoxy-2'-fluorocytidine-3'-phosphate
  modified_base 12: mod_base = OTHER; note = 2'-O-methyluridine-3'-phosphate
  modified_base 13: mod_base = OTHER; note = 2'-O-methyladenosine-3'-phosphate
  modified_base 14: mod_base = OTHER; note = 2'-O-methylcytidine-3'-phosphate
  modified_base 15: mod_base = OTHER; note = 2'-O-methyluridine-3'-phosphate
  modified_base 16: mod_base = OTHER; note = 2'-O-methylcytidine-3'-phosphate
  modified_base 17: mod_base = OTHER; note = 2'-O-methylcytidine-3'-phosphate
  modified_base 18: mod_base = OTHER; note = 2'-O-methylcytidine-3'-phosphate
  modified_base 19: mod_base = OTHER; note = 2'-O-methyluridine-3'-phosphorothioate
  modified_base 20: mod_base = OTHER; note = 2'-O-methylguanosine-3'-phosphorothioate
  modified_base 21: mod_base = OTHER; note = 2'-O-methyladenosine
tcccacttctctactccctga

SEQ ID NO: 4117 - RNA, 21 nt, synthetic construct
  source 1..21: mol_type = other RNA
  modified_base 1: mod_base = OTHER; note = 2'-O-methylguanosine-3'-phosphorothioate
  modified_base 2: mod_base = OTHER; note = 2'-O-methylcytidine-3'-phosphorothioate
  modified_base 3: mod_base = OTHER; note = 2'-O-methyladenosine-3'-phosphate
  modified_base 4: mod_base = OTHER; note = 2'-O-methyluridine-3'-phosphate
  modified_base 5: mod_base = OTHER; note = 2'-O-methyluridine-3'-phosphate
  modified_base 6: mod_base = OTHER; note = 2'-O-hexadecyl-uridine-3'-phosphate
  modified_base 7: mod_base = OTHER; note = 2'-deoxy-2'-fluoroguanosine-3'-phosphate
  modified_base 8: mod_base = OTHER; note = 2'-O-methylguanosine-3'-phosphate
  modified_base 9: mod_base = OTHER; note = 2'-deoxy-2'-fluoroadenosine-3'-phosphate
  modified_base 10: mod_base = OTHER; note = 2'-deoxy-2'-fluorocytidine-3'-phosphate
  modified_base 11: mod_base = OTHER; note = 2'-deoxy-2'-fluoroadenosine-3'-phosphate
  modified_base 12: mod_base = OTHER; note = 2'-O-methylguanosine-3'-phosphate
  modified_base 13: mod_base = OTHER; note = 2'-O-methyluridine-3'-phosphate
  modified_base 14: mod_base = OTHER; note = 2'-O-methyluridine-3'-phosphate
  modified_base 15: mod_base = OTHER; note = 2'-O-methyluridine-3'-phosphate
  modified_base 16: mod_base = OTHER; note = 2'-O-methyluridine-3'-phosphate
  modified_base 17: mod_base = OTHER; note = 2'-O-methyluridine-3'-phosphate
  modified_base 18: mod_base = OTHER; note = 2'-O-methylcytidine-3'-phosphate
  modified_base 19: mod_base = OTHER; note = 2'-O-methyluridine-3'-phosphorothioate
  modified_base 20: mod_base = OTHER; note = 2'-O-methylcytidine-3'-phosphorothioate
  modified_base 21: mod_base = OTHER; note = 2'-O-methyladenosine
gcatttggacagtttttctca

SEQ ID NO: 4118 - RNA, 21 nt, synthetic construct
  source 1..21: mol_type = other RNA
  modified_base 1: mod_base = OTHER; note = 2'-O-methylguanosine-3'-phosphorothioate
  modified_base 2: mod_base = OTHER; note = 2'-O-methyladenosine-3'-phosphorothioate
  modified_base 3: mod_base = OTHER; note = 2'-O-methyladenosine-3'-phosphate
  modified_base 4: mod_base = OTHER; note = 2'-O-methylguanosine-3'-phosphate
  modified_base 5: mod_base = OTHER; note = 2'-O-methyluridine-3'-phosphate
  modified_base 6: mod_base = OTHER; note = 2'-O-hexadecyl-cytidine-3'-phosphate
  modified_base 7: mod_base = OTHER; note = 2'-deoxy-2'-fluoroadenosine-3'-phosphate
  modified_base 8: mod_base = OTHER; note = 2'-O-methyluridine-3'-phosphate
  modified_base 9: mod_base = OTHER; note = 2'-deoxy-2'-fluorocytidine-3'-phosphate
  modified_base 10: mod_base = OTHER; note = 2'-deoxy-2'-fluorouridine-3'-phosphate
  modified_base 11: mod_base = OTHER; note = 2'-deoxy-2'-fluoroadenosine-3'-phosphate
  modified_base 12: mod_base = OTHER; note = 2'-O-methylcytidine-3'-phosphate
  modified_base 13: mod_base = OTHER; note = 2'-O-methyladenosine-3'-phosphate
  modified_base 14: mod_base = OTHER; note = 2'-O-methyladenosine-3'-phosphate
  modified_base 15: mod_base = OTHER; note = 2'-O-methyluridine-3'-phosphate
  modified_base 16: mod_base = OTHER; note = 2'-O-methyladenosine-3'-phosphate
  modified_base 17: mod_base = OTHER; note = 2'-O-methyladenosine-3'-phosphate
  modified_base 18: mod_base = OTHER; note = 2'-O-methylguanosine-3'-phosphate
  modified_base 19: mod_base = OTHER; note = 2'-O-methyladenosine-3'-phosphorothioate
  modified_base 20: mod_base = OTHER; note = 2'-O-methylcytidine-3'-phosphorothioate
  modified_base 21: mod_base = OTHER; note = 2'-O-methyladenosine
gaagtcatctacaataagaca

SEQ ID NO: 4119 - RNA, 21 nt, synthetic construct
  source 1..21: mol_type = other RNA
  modified_base 1: mod_base = OTHER; note = 2'-O-methylcytidine-3'-phosphorothioate
  modified_base 2: mod_base = OTHER; note = 2'-O-methyluridine-3'-phosphorothioate
  modified_base 3: mod_base = OTHER; note = 2'-O-methylguanosine-3'-phosphate
  modified_base 4: mod_base = OTHER; note = 2'-O-methylcytidine-3'-phosphate
  modified_base 5: mod_base = OTHER; note = 2'-O-methylcytidine-3'-phosphate
  modified_base 6: mod_base = OTHER; note = 2'-O-hexadecyl-adenosine-3'-phosphate
  modified_base 7: mod_base = OTHER; note = 2'-deoxy-2'-fluorouridine-3'-phosphate
  modified_base 8: mod_base = OTHER; note = 2'-O-methyluridine-3'-phosphate
  modified_base 9: mod_base = OTHER; note = 2'-deoxy-2'-fluorouridine-3'-phosphate
  modified_base 10: mod_base = OTHER; note = 2'-deoxy-2'-fluorocytidine-3'-phosphate
  modified_base 11: mod_base = OTHER; note = 2'-deoxy-2'-fluorouridine-3'-phosphate
  modified_base 12: mod_base = OTHER; note = 2'-O-methyladenosine-3'-phosphate
  modified_base 13: mod_base = OTHER; note = 2'-O-methylcytidine-3'-phosphate
  modified_base 14: mod_base = OTHER; note = 2'-O-methylguanosine-3'-phosphate
  modified_base 15: mod_base = OTHER; note = 2'-O-methylcytidine-3'-phosphate
  modified_base 16: mod_base = OTHER; note = 2'-O-methyladenosine-3'-phosphate
  modified_base 17: mod_base = OTHER; note = 2'-O-methylguanosine-3'-phosphate
  modified_base 18: mod_base = OTHER; note = 2'-O-methyluridine-3'-phosphate
  modified_base 19: mod_base = OTHER; note = 2'-O-methylguanosine-3'-phosphorothioate
  modified_base 20: mod_base = OTHER; note = 2'-O-methyluridine-3'-phosphorothioate
  modified_base 21: mod_base = OTHER; note = 2'-O-methyladenosine
ctgccatttctacgcagtgta

SEQ ID NO: 4120 - RNA, 21 nt, synthetic construct
  source 1..21: mol_type = other RNA
  modified_base 1: mod_base = OTHER; note = 2'-O-methylcytidine-3'-phosphorothioate
  modified_base 2: mod_base = OTHER; note = 2'-O-methyladenosine-3'-phosphorothioate
  modified_base 3: mod_base = OTHER; note = 2'-O-methylcytidine-3'-phosphate
  modified_base 4: mod_base = OTHER; note = 2'-O-methyluridine-3'-phosphate
  modified_base 5: mod_base = OTHER; note = 2'-O-methylguanosine-3'-phosphate
  modified_base 6: mod_base = OTHER; note = 2'-O-hexadecyl-uridine-3'-phosphate
  modified_base 7: mod_base = OTHER; note = 2'-deoxy-2'-fluoroguanosine-3'-phosphate
  modified_base 8: mod_base = OTHER; note = 2'-O-methyladenosine-3'-phosphate
  modified_base 9: mod_base = OTHER; note = 2'-deoxy-2'-fluorocytidine-3'-phosphate
  modified_base 10: mod_base = OTHER; note = 2'-deoxy-2'-fluoroadenosine-3'-phosphate
  modified_base 11: mod_base = OTHER; note = 2'-deoxy-2'-fluorouridine-3'-phosphate
  modified_base 12: mod_base = OTHER; note = 2'-O-methyluridine-3'-phosphate
  modified_base 13: mod_base = OTHER; note = 2'-O-methylguanosine-3'-phosphate
  modified_base 14: mod_base = OTHER; note = 2'-O-methyladenosine-3'-phosphate
  modified_base 15: mod_base = OTHER; note = 2'-O-methylcytidine-3'-phosphate
  modified_base 16: mod_base = OTHER; note = 2'-O-methylcytidine-3'-phosphate
  modified_base 17: mod_base = OTHER; note = 2'-O-methylguanosine-3'-phosphate
  modified_base 18: mod_base = OTHER; note = 2'-O-methylcytidine-3'-phosphate
  modified_base 19: mod_base = OTHER; note = 2'-O-methyluridine-3'-phosphorothioate
  modified_base 20: mod_base = OTHER; note = 2'-O-methyluridine-3'-phosphorothioate
  modified_base 21: mod_base = OTHER; note = 2'-O-methyladenosine
cactgtgacattgaccgctta

SEQ ID NO: 4121 - RNA, 21 nt, synthetic construct
  source 1..21: mol_type = other RNA
  modified_base 1: mod_base = OTHER; note = 2'-O-methyluridine-3'-phosphorothioate
  modified_base 2: mod_base = OTHER; note = 2'-O-methylguanosine-3'-phosphorothioate
  modified_base 3: mod_base = OTHER; note = 2'-O-methyluridine-3'-phosphate
  modified_base 4: mod_base = OTHER; note = 2'-O-methylguanosine-3'-phosphate
  modified_base 5: mod_base = OTHER; note = 2'-O-methyladenosine-3'-phosphate
  modified_base 6: mod_base = OTHER; note = 2'-O-hexadecyl-cytidine-3'-phosphate
  modified_base 7: mod_base = OTHER; note = 2'-deoxy-2'-fluoroadenosine-3'-phosphate
  modified_base 8: mod_base = OTHER; note = 2'-O-methyladenosine-3'-phosphate
  modified_base 9: mod_base = OTHER; note = 2'-deoxy-2'-fluorouridine-3'-phosphate
  modified_base 10: mod_base = OTHER; note = 2'-deoxy-2'-fluoroguanosine-3'-phosphate
  modified_base 11: mod_base = OTHER; note = 2'-deoxy-2'-fluorocytidine-3'-phosphate
  modified_base 12: mod_base = OTHER; note = 2'-O-methylcytidine-3'-phosphate
  modified_base 13: mod_base = OTHER; note = 2'-O-methyladenosine-3'-phosphate
  modified_base 14: mod_base = OTHER; note = 2'-O-methyluridine-3'-phosphate
  modified_base 15: mod_base = OTHER; note = 2'-O-methylcytidine-3'-phosphate
  modified_base 16: mod_base = OTHER; note = 2'-O-methylcytidine-3'-phosphate
  modified_base 17: mod_base = OTHER; note = 2'-O-methylcytidine-3'-phosphate
  modified_base 18: mod_base = OTHER; note = 2'-O-methyluridine-3'-phosphate
  modified_base 19: mod_base = OTHER; note = 2'-O-methylcytidine-3'-phosphorothioate
  modified_base 20: mod_base = OTHER; note = 2'-O-methyluridine-3'-phosphorothioate
  modified_base 21: mod_base = OTHER; note = 2'-O-methyladenosine
tgtgacaatgccatccctcta

SEQ ID NO: 4122 - RNA, 21 nt, synthetic construct
  source 1..21: mol_type = other RNA
  modified_base 1: mod_base = OTHER; note = 2'-O-methyladenosine-3'-phosphorothioate
  modified_base 2: mod_base = OTHER; note = 2'-O-methylcytidine-3'-phosphorothioate
  modified_base 3: mod_base = OTHER; note = 2'-O-methylcytidine-3'-phosphate
  modified_base 4: mod_base = OTHER; note = 2'-O-methylcytidine-3'-phosphate
  modified_base 5: mod_base = OTHER; note = 2'-O-methyluridine-3'-phosphate
  modified_base 6: mod_base = OTHER; note = 2'-O-hexadecyl-guanosine-3'-phosphate
  modified_base 7: mod_base = OTHER; note = 2'-deoxy-2'-fluoroguanosine-3'-phosphate
  modified_base 8: mod_base = OTHER; note = 2'-O-methyladenosine-3'-phosphate
  modified_base 9: mod_base = OTHER; note = 2'-deoxy-2'-fluoroguanosine-3'-phosphate
  modified_base 10: mod_base = OTHER; note = 2'-deoxy-2'-fluoroadenosine-3'-phosphate
  modified_base 11: mod_base = OTHER; note = 2'-deoxy-2'-fluoroadenosine-3'-phosphate
  modified_base 12: mod_base = OTHER; note = 2'-O-methylcytidine-3'-phosphate
  modified_base 13: mod_base = OTHER; note = 2'-O-methyluridine-3'-phosphate
  modified_base 14: mod_base = OTHER; note = 2'-O-methylguanosine-3'-phosphate
  modified_base 15: mod_base = OTHER; note = 2'-O-methylcytidine-3'-phosphate
  modified_base 16: mod_base = OTHER; note = 2'-O-methyladenosine-3'-phosphate
  modified_base 17: mod_base = OTHER; note = 2'-O-methylcytidine-3'-phosphate
  modified_base 18: mod_base = OTHER; note = 2'-O-methylguanosine-3'-phosphate
  modified_base 19: mod_base = OTHER; note = 2'-O-methylguanosine-3'-phosphorothioate
  modified_base 20: mod_base = OTHER; note = 2'-O-methyluridine-3'-phosphorothioate
  modified_base 21: mod_base = OTHER; note = 2'-O-methyladenosine
accctggagaactgcacggta

SEQ ID NO: 4123 - RNA, 21 nt, synthetic construct
  source 1..21: mol_type = other RNA
  modified_base 1: mod_base = OTHER; note = 2'-O-methylguanosine-3'-phosphorothioate
  modified_base 2: mod_base = OTHER; note = 2'-O-methyluridine-3'-phosphorothioate
  modified_base 3: mod_base = OTHER; note = 2'-O-methylguanosine-3'-phosphate
  modified_base 4: mod_base = OTHER; note = 2'-O-methylguanosine-3'-phosphate
  modified_base 5: mod_base = OTHER; note = 2'-O-methylguanosine-3'-phosphate
  modified_base 6: mod_base = OTHER; note = 2'-O-hexadecyl-uridine-3'-phosphate
  modified_base 7: mod_base = OTHER; note = 2'-deoxy-2'-fluoroguanosine-3'-phosphate
  modified_base 8: mod_base = OTHER; note = 2'-O-methyladenosine-3'-phosphate
  modified_base 9: mod_base = OTHER; note = 2'-deoxy-2'-fluorocytidine-3'-phosphate
  modified_base 10: mod_base = OTHER; note = 2'-deoxy-2'-fluoroadenosine-3'-phosphate
  modified_base 11: mod_base = OTHER; note = 2'-deoxy-2'-fluoroadenosine-3'-phosphate
  modified_base 12: mod_base = OTHER; note = 2'-O-methylcytidine-3'-phosphate
  modified_base 13: mod_base = OTHER; note = 2'-O-methylcytidine-3'-phosphate
  modified_base 14: mod_base = OTHER; note = 2'-O-methylguanosine-3'-phosphate
  modified_base 15: mod_base = OTHER; note = 2'-O-methyluridine-3'-phosphate
  modified_base 16: mod_base = OTHER; note = 2'-O-methylguanosine-3'-phosphate
  modified_base 17: mod_base = OTHER; note = 2'-O-methyluridine-3'-phosphate
  modified_base 18: mod_base = OTHER; note = 2'-O-methylcytidine-3'-phosphate
  modified_base 19: mod_base = OTHER; note = 2'-O-methylguanosine-3'-phosphorothioate
  modified_base 20: mod_base = OTHER; note = 2'-O-methyluridine-3'-phosphorothioate
  modified_base 21: mod_base = OTHER; note = 2'-O-methyladenosine
gtgggtgacaaccgtgtcgta

SEQ ID NO: 4124 - RNA, 21 nt, synthetic construct
  source 1..21: mol_type = other RNA
  modified_base 1: mod_base = OTHER; note = 2'-O-methylguanosine-3'-phosphorothioate
  modified_base 2: mod_base = OTHER; note = 2'-O-methyladenosine-3'-phosphorothioate
  modified_base 3: mod_base = OTHER; note = 2'-O-methylcytidine-3'-phosphate
  modified_base 4: mod_base = OTHER; note = 2'-O-methylcytidine-3'-phosphate
  modified_base 5: mod_base = OTHER; note = 2'-O-methylcytidine-3'-phosphate
  modified_base 6: mod_base = OTHER; note = 2'-O-hexadecyl-adenosine-3'-phosphate
  modified_base 7: mod_base = OTHER; note = 2'-deoxy-2'-fluoroadenosine-3'-phosphate
  modified_base 8: mod_base = OTHER; note = 2'-O-methyladenosine-3'-phosphate
  modified_base 9: mod_base = OTHER; note = 2'-deoxy-2'-fluoroguanosine-3'-phosphate
  modified_base 10: mod_base = OTHER; note = 2'-deoxy-2'-fluorocytidine-3'-phosphate
  modified_base 11: mod_base = OTHER; note = 2'-deoxy-2'-fluorocytidine-3'-phosphate
  modified_base 12: mod_base = OTHER; note = 2'-O-methyluridine-3'-phosphate
  modified_base 13: mod_base = OTHER; note = 2'-O-methylguanosine-3'-phosphate
  modified_base 14: mod_base = OTHER; note = 2'-O-methyluridine-3'-phosphate
  modified_base 15: mod_base = OTHER; note = 2'-O-methylguanosine-3'-phosphate
  modified_base 16: mod_base = OTHER; note = 2'-O-methylguanosine-3'-phosphate
  modified_base 17: mod_base = OTHER; note = 2'-O-methylcytidine-3'-phosphate
  modified_base 18: mod_base = OTHER; note = 2'-O-methylcytidine-3'-phosphate
  modified_base 19: mod_base = OTHER; note = 2'-O-methyladenosine-3'-phosphorothioate
  modified_base 20: mod_base = OTHER; note = 2'-O-methyladenosine-3'-phosphorothioate
  modified_base 21: mod_base = OTHER; note = 2'-O-methyladenosine
gacccaaagcctgtggccaaa

SEQ ID NO: 4125 - RNA, 21 nt, synthetic construct
  source 1..21: mol_type = other RNA
  modified_base 1: mod_base = OTHER; note = 2'-O-methylcytidine-3'-phosphorothioate
  modified_base 2: mod_base = OTHER; note = 2'-O-methyluridine-3'-phosphorothioate
  modified_base 3: mod_base = OTHER; note = 2'-O-methylguanosine-3'-phosphate
  modified_base 4: mod_base = OTHER; note = 2'-O-methylcytidine-3'-phosphate
  modified_base 5: mod_base = OTHER; note = 2'-O-methylguanosine-3'-phosphate
  modified_base 6: mod_base = OTHER; note = 2'-O-hexadecyl-uridine-3'-phosphate
  modified_base 7: mod_base = OTHER; note = 2'-deoxy-2'-fluoroguanosine-3'-phosphate
  modified_base 8: mod_base = OTHER; note = 2'-O-methyladenosine-3'-phosphate
  modified_base 9: mod_base = OTHER; note = 2'-deoxy-2'-fluoroadenosine-3'-phosphate
  modified_base 10: mod_base = OTHER; note = 2'-deoxy-2'-fluorocytidine-3'-phosphate
  modified_base 11: mod_base = OTHER; note = 2'-deoxy-2'-fluoroadenosine-3'-phosphate
  modified_base 12: mod_base = OTHER; note = 2'-O-methyladenosine-3'-phosphate
  modified_base 13: mod_base = OTHER; note = 2'-O-methylguanosine-3'-phosphate
  modified_base 14: mod_base = OTHER; note = 2'-O-methylcytidine-3'-phosphate
  modified_base 15: mod_base = OTHER; note = 2'-O-methyladenosine-3'-phosphate
  modified_base 16: mod_base = OTHER; note = 2'-O-methylcytidine-3'-phosphate
  modified_base 17: mod_base = OTHER; note = 2'-O-methylcytidine-3'-phosphate
  modified_base 18: mod_base = OTHER; note = 2'-O-methyluridine-3'-phosphate
  modified_base 19: mod_base = OTHER; note = 2'-O-methylguanosine-3'-phosphorothioate
  modified_base 20: mod_base = OTHER; note = 2'-O-methylcytidine-3'-phosphorothioate
  modified_base 21: mod_base = OTHER; note = 2'-O-methyladenosine
ctgcgtgaacaagcacctgca

SEQ ID NO: 4126 - RNA, 21 nt, synthetic construct
  source 1..21: mol_type = other RNA
  modified_base 1: mod_base = OTHER; note = 2'-O-methyluridine-3'-phosphorothioate
  modified_base 2: mod_base = OTHER; note = 2'-O-methylcytidine-3'-phosphorothioate
  modified_base 3: mod_base = OTHER; note = 2'-O-methyladenosine-3'-phosphate
  modified_base 4: mod_base = OTHER; note = 2'-O-methyladenosine-3'-phosphate
  modified_base 5: mod_base = OTHER; note = 2'-O-methyladenosine-3'-phosphate
  modified_base 6: mod_base = OTHER; note = 2'-O-hexadecyl-guanosine-3'-phosphate
  modified_base 7: mod_base = OTHER; note = 2'-deoxy-2'-fluorouridine-3'-phosphate
  modified_base 8: mod_base = OTHER; note = 2'-O-methylguanosine-3'-phosphate
  modified_base 9: mod_base = OTHER; note = 2'-deoxy-2'-fluorouridine-3'-phosphate
  modified_base 10: mod_base = OTHER; note = 2'-deoxy-2'-fluorocytidine-3'-phosphate
  modified_base 11: mod_base = OTHER; note = 2'-deoxy-2'-fluoroguanosine-3'-phosphate
  modified_base 12: mod_base = OTHER; note = 2'-O-methylguanosine-3'-phosphate
  modified_base 13: mod_base = OTHER; note = 2'-O-methyladenosine-3'-phosphate
  modified_base 14: mod_base = OTHER; note = 2'-O-methylcytidine-3'-phosphate
  modified_base 15: mod_base = OTHER; note = 2'-O-methylcytidine-3'-phosphate
  modified_base 16: mod_base = OTHER; note = 2'-O-methylcytidine-3'-phosphate
  modified_base 17: mod_base = OTHER; note = 2'-O-methylguanosine-3'-phosphate
  modified_base 18: mod_base = OTHER; note = 2'-O-methyladenosine-3'-phosphate
  modified_base 19: mod_base = OTHER; note = 2'-O-methylguanosine-3'-phosphorothioate
  modified_base 20: mod_base = OTHER; note = 2'-O-methylcytidine-3'-phosphorothioate
  modified_base 21: mod_base = OTHER; note = 2'-O-methyladenosine
tcaaagtgtcggacccgagca

SEQ ID NO: 4127 - RNA, 21 nt, synthetic construct
  source 1..21: mol_type = other RNA
  modified_base 1: mod_base = OTHER; note = 2'-O-methylcytidine-3'-phosphorothioate
  modified_base 2: mod_base = OTHER; note = 2'-O-methylcytidine-3'-phosphorothioate
  modified_base 3: mod_base = OTHER; note = 2'-O-methyluridine-3'-phosphate
  modified_base 4: mod_base = OTHER; note = 2'-O-methylguanosine-3'-phosphate
  modified_base 5: mod_base = OTHER; note = 2'-O-methyluridine-3'-phosphate
  modified_base 6: mod_base = OTHER; note = 2'-O-hexadecyl-guanosine-3'-phosphate
  modified_base 7: mod_base = OTHER; note = 2'-deoxy-2'-fluoroadenosine-3'-phosphate
  modified_base 8: mod_base = OTHER; note = 2'-O-methylcytidine-3'-phosphate
  modified_base 9: mod_base = OTHER; note = 2'-deoxy-2'-fluorouridine-3'-phosphate
  modified_base 10: mod_base = OTHER; note = 2'-deoxy-2'-fluorouridine-3'-phosphate
  modified_base 11: mod_base = OTHER; note = 2'-deoxy-2'-fluorocytidine-3'-phosphate
  modified_base 12: mod_base = OTHER; note = 2'-O-methylcytidine-3'-phosphate
  modified_base 13: mod_base = OTHER; note = 2'-O-methyladenosine-3'-phosphate
  modified_base 14: mod_base = OTHER; note = 2'-O-methylcytidine-3'-phosphate
  modified_base 15: mod_base = OTHER; note = 2'-O-methyluridine-3'-phosphate
  modified_base 16: mod_base = OTHER; note = 2'-O-methyladenosine-3'-phosphate
  modified_base 17: mod_base = OTHER; note = 2'-O-methyluridine-3'-phosphate
  modified_base 18: mod_base = OTHER; note = 2'-O-methylguanosine-3'-phosphate
  modified_base 19: mod_base = OTHER; note = 2'-O-methyladenosine-3'-phosphorothioate
  modified_base 20: mod_base = OTHER; note = 2'-O-methylguanosine-3'-phosphorothioate
  modified_base 21: mod_base = OTHER; note = 2'-O-methyladenosine
cctgtgacttccactatgaga

SEQ ID NO: 4128 - RNA, 21 nt, synthetic construct
  source 1..21: mol_type = other RNA
  modified_base 1: mod_base = OTHER; note = 2'-O-methylguanosine-3'-phosphorothioate
  modified_base 2: mod_base = OTHER; note = 2'-O-methyladenosine-3'-phosphorothioate
  modified_base 3: mod_base = OTHER; note = 2'-O-methylguanosine-3'-phosphate
  modified_base 4: mod_base = OTHER; note = 2'-O-methyluridine-3'-phosphate
  modified_base 5: mod_base = OTHER; note = 2'-O-methylguanosine-3'-phosphate
  modified_base 6: mod_base = OTHER; note = 2'-O-hexadecyl-cytidine-3'-phosphate
  modified_base 7: mod_base = OTHER; note = 2'-deoxy-2'-fluoroadenosine-3'-phosphate
  modified_base 8: mod_base = OTHER; note = 2'-O-methyluridine-3'-phosphate
  modified_base 9: mod_base = OTHER; note = 2'-deoxy-2'-fluorocytidine-3'-phosphate
  modified_base 10: mod_base = OTHER; note = 2'-deoxy-2'-fluorouridine-3'-phosphate
  modified_base 11: mod_base = OTHER; note = 2'-deoxy-2'-fluoroguanosine-3'-phosphate
  modified_base 12: mod_base = OTHER; note = 2'-O-methylcytidine-3'-phosphate
  modified_base 13: mod_base = OTHER; note = 2'-O-methyladenosine-3'-phosphate
  modified_base 14: mod_base = OTHER; note = 2'-O-methylguanosine-3'-phosphate
  modified_base 15: mod_base = OTHER; note = 2'-O-methylcytidine-3'-phosphate
  modified_base 16: mod_base = OTHER; note = 2'-O-methyladenosine-3'-phosphate
  modified_base 17: mod_base = OTHER; note = 2'-O-methyluridine-3'-phosphate
  modified_base 18: mod_base = OTHER; note = 2'-O-methylguanosine-3'-phosphate
  modified_base 19: mod_base = OTHER; note = 2'-O-methyluridine-3'-phosphorothioate
  modified_base 20: mod_base = OTHER; note = 2'-O-methylguanosine-3'-phosphorothioate
  modified_base 21: mod_base = OTHER; note = 2'-O-methyladenosine
gagtgcatctgcagcatgtga

SEQ ID NO: 4129 - RNA, 21 nt, synthetic construct
  source 1..21: mol_type = other RNA
  modified_base 1: mod_base = OTHER; note = 2'-O-methylcytidine-3'-phosphorothioate
  modified_base 2: mod_base = OTHER; note = 2'-O-methylcytidine-3'-phosphorothioate
  modified_base 3: mod_base = OTHER; note = 2'-O-methylcytidine-3'-phosphate
  modified_base 4: mod_base = OTHER; note = 2'-O-methyladenosine-3'-phosphate
  modified_base 5: mod_base = OTHER; note = 2'-O-methylcytidine-3'-phosphate
  modified_base 6: mod_base = OTHER; note = 2'-O-hexadecyl-uridine-3'-phosphate
  modified_base 7: mod_base = OTHER; note = 2'-deoxy-2'-fluoroadenosine-3'-phosphate
  modified_base 8: mod_base = OTHER; note = 2'-O-methyluridine-3'-phosphate
  modified_base 9: mod_base = OTHER; note = 2'-deoxy-2'-fluorouridine-3'-phosphate
  modified_base 10: mod_base = OTHER; note = 2'-deoxy-2'-fluorocytidine-3'-phosphate
  modified_base 11: mod_base = OTHER; note = 2'-deoxy-2'-fluorocytidine-3'-phosphate
  modified_base 12: mod_base = OTHER; note = 2'-O-methyladenosine-3'-phosphate
  modified_base 13: mod_base = OTHER; note = 2'-O-methylcytidine-3'-phosphate
  modified_base 14: mod_base = OTHER; note = 2'-O-methylcytidine-3'-phosphate
  modified_base 15: mod_base = OTHER; note = 2'-O-methyluridine-3'-phosphate
  modified_base 16: mod_base = OTHER; note = 2'-O-methyluridine-3'-phosphate
  modified_base 17: mod_base = OTHER; note = 2'-O-methyluridine-3'-phosphate
  modified_base 18: mod_base = OTHER; note = 2'-O-methylguanosine-3'-phosphate
  modified_base 19: mod_base = OTHER; note = 2'-O-methyladenosine-3'-phosphorothioate
  modified_base 20: mod_base = OTHER; note = 2'-O-methylcytidine-3'-phosphorothioate
  modified_base 21: mod_base = OTHER; note = 2'-O-methyladenosine
cccactattccacctttgaca

SEQ ID NO: 4130 - RNA, 21 nt, synthetic construct
  source 1..21: mol_type = other RNA
  modified_base 1: mod_base = OTHER; note = 2'-O-methyladenosine-3'-phosphorothioate
  modified_base 2: mod_base = OTHER; note = 2'-O-methylcytidine-3'-phosphorothioate
  modified_base 3: mod_base = OTHER; note = 2'-O-methylcytidine-3'-phosphate
  modified_base 4: mod_base = OTHER; note = 2'-O-methyluridine-3'-phosphate
  modified_base 5: mod_base = OTHER; note = 2'-O-methyladenosine-3'-phosphate
  modified_base 6: mod_base = OTHER; note = 2'-O-hexadecyl-uridine-3'-phosphate
  modified_base 7: mod_base = OTHER; note = 2'-deoxy-2'-fluoroguanosine-3'-phosphate
  modified_base 8: mod_base = OTHER; note = 2'-O-methyluridine-3'-phosphate
  modified_base 9: mod_base = OTHER; note = 2'-deoxy-2'-fluorocytidine-3'-phosphate
  modified_base 10: mod_base = OTHER; note = 2'-deoxy-2'-fluorocytidine-3'-phosphate
  modified_base 11: mod_base = OTHER; note = 2'-deoxy-2'-fluorouridine-3'-phosphate
  modified_base 12: mod_base = OTHER; note = 2'-O-methylcytidine-3'-phosphate
  modified_base 13: mod_base = OTHER; note = 2'-O-methyladenosine-3'-phosphate
  modified_base 14: mod_base = OTHER; note = 2'-O-methyluridine-3'-phosphate
  modified_base 15: mod_base = OTHER; note = 2'-O-methylguanosine-3'-phosphate
  modified_base 16: mod_base = OTHER; note = 2'-O-methyladenosine-3'-phosphate
  modified_base 17: mod_base = OTHER; note = 2'-O-methylguanosine-3'-phosphate
  modified_base 18: mod_base = OTHER; note = 2'-O-methyladenosine-3'-phosphate
  modified_base 19: mod_base = OTHER; note = 2'-O-methylguanosine-3'-phosphorothioate
  modified_base 20: mod_base = OTHER; note = 2'-O-methyladenosine-3'-phosphorothioate
  modified_base 21: mod_base = OTHER; note = 2'-O-methyladenosine
acctatgtcctcatgagagaa

SEQ ID NO: 4131 - RNA, 21 nt, synthetic construct
  source 1..21: mol_type = other RNA
  modified_base 1: mod_base = OTHER; note = 2'-O-methylcytidine-3'-phosphorothioate
  modified_base 2: mod_base = OTHER; note = 2'-O-methyladenosine-3'-phosphorothioate
  modified_base 3: mod_base = OTHER; note = 2'-O-methylcytidine-3'-phosphate
  modified_base 4: mod_base = OTHER; note = 2'-O-methylguanosine-3'-phosphate
  modified_base 5: mod_base = OTHER; note = 2'-O-methylcytidine-3'-phosphate
  modified_base 6: mod_base = OTHER; note = 2'-O-hexadecyl-uridine-3'-phosphate
  modified_base 7: mod_base = OTHER; note = 2'-deoxy-2'-fluorouridine-3'-phosphate
  modified_base 8: mod_base = OTHER; note = 2'-O-methyluridine-3'-phosphate
  modified_base 9: mod_base = OTHER; note = 2'-deoxy-2'-fluoroguanosine-3'-phosphate
  modified_base 10: mod_base = OTHER; note = 2'-deoxy-2'-fluoroguanosine-3'-phosphate
  modified_base 11: mod_base = OTHER; note = 2'-deoxy-2'-fluoroguanosine-3'-phosphate
  modified_base 12: mod_base = OTHER; note = 2'-O-methyladenosine-3'-phosphate
  modified_base 13: mod_base = OTHER; note = 2'-O-methyladenosine-3'-phosphate
  modified_base 14: mod_base = OTHER; note = 2'-O-methyluridine-3'-phosphate
  modified_base 15: mod_base = OTHER; note = 2'-O-methylcytidine-3'-phosphate
  modified_base 16: mod_base = OTHER; note = 2'-O-methyluridine-3'-phosphate
  modified_base 17: mod_base = OTHER; note = 2'-O-methylcytidine-3'-phosphate
  modified_base 18: mod_base = OTHER; note = 2'-O-methyladenosine-3'-phosphate
  modified_base 19: mod_base = OTHER; note = 2'-O-methylguanosine-3'-phosphorothioate
  modified_base 20: mod_base = OTHER; note = 2'-O-methylcytidine-3'-phosphorothioate
  modified_base 21: mod_base = OTHER; note = 2'-O-methyladenosine
cacgctttgggaatctcagca

SEQ ID NO: 4132 - RNA, 21 nt, synthetic construct
  source 1..21: mol_type = other RNA
  modified_base 1: mod_base = OTHER; note = 2'-O-methylcytidine-3'-phosphorothioate
  modified_base 2: mod_base = OTHER; note = 2'-O-methyluridine-3'-phosphorothioate
  modified_base 3: mod_base = OTHER; note = 2'-O-methylguanosine-3'-phosphate
  modified_base 4: mod_base = OTHER; note = 2'-O-methylguanosine-3'-phosphate
  modified_base 5: mod_base = OTHER; note = 2'-O-methyladenosine-3'-phosphate
  modified_base 6: mod_base = OTHER; note = 2'-O-hexadecyl-cytidine-3'-phosphate
  modified_base 7: mod_base = OTHER; note = 2'-deoxy-2'-fluoroadenosine-3'-phosphate
  modified_base 8: mod_base = OTHER; note = 2'-O-methyladenosine-3'-phosphate
  modified_base 9: mod_base = OTHER; note = 2'-deoxy-2'-fluorocytidine-3'-phosphate
  modified_base 10: mod_base = OTHER; note = 2'-deoxy-2'-fluorocytidine-3'-phosphate
  modified_base 11: mod_base = OTHER; note = 2'-deoxy-2'-fluoroadenosine-3'-phosphate
  modified_base 12: mod_base = OTHER; note = 2'-O-methylcytidine-3'-phosphate
  modified_base 13: mod_base = OTHER; note = 2'-O-methyluridine-3'-phosphate
  modified_base 14: mod_base = OTHER; note = 2'-O-methyladenosine-3'-phosphate
  modified_base 15: mod_base = OTHER; note = 2'-O-methylcytidine-3'-phosphate
  modified_base 16: mod_base = OTHER; note = 2'-O-methyluridine-3'-phosphate
  modified_base 17: mod_base = OTHER; note = 2'-O-methylguanosine-3'-phosphate
  modified_base 18: mod_base = OTHER; note = 2'-O-methylcytidine-3'-phosphate
  modified_base 19: mod_base = OTHER; note = 2'-O-methyladenosine-3'-phosphorothioate
  modified_base 20: mod_base = OTHER; note = 2'-O-methylcytidine-3'-phosphorothioate
  modified_base 21: mod_base = OTHER; note = 2'-O-methyladenosine
ctggacaaccactactgcaca

SEQ ID NO: 4133 - RNA, 21 nt, synthetic construct
  source 1..21: mol_type = other RNA
  modified_base 1: mod_base = OTHER; note = 2'-O-methylcytidine-3'-phosphorothioate
  modified_base 2: mod_base = OTHER; note = 2'-O-methyluridine-3'-phosphorothioate
  modified_base 3: mod_base = OTHER; note = 2'-O-methylcytidine-3'-phosphate
  modified_base 4: mod_base = OTHER; note = 2'-O-methyladenosine-3'-phosphate
  modified_base 5: mod_base = OTHER; note = 2'-O-methylguanosine-3'-phosphate
  modified_base 6: mod_base = OTHER; note = 2'-O-hexadecyl-cytidine-3'-phosphate
  modified_base 7: mod_base = OTHER; note = 2'-deoxy-2'-fluoroadenosine-3'-phosphate
  modified_base 8: mod_base = OTHER; note = 2'-O-methyluridine-3'-phosphate
  modified_base 9: mod_base = OTHER; note = 2'-deoxy-2'-fluorocytidine-3'-phosphate
  modified_base 10: mod_base = OTHER; note = 2'-deoxy-2'-fluorocytidine-3'-phosphate
  modified_base 11: mod_base = OTHER; note = 2'-deoxy-2'-fluoroadenosine-3'-phosphate
  modified_base 12: mod_base = OTHER; note = 2'-O-methylcytidine-3'-phosphate
  modified_base 13: mod_base = OTHER; note = 2'-O-methyluridine-3'-phosphate
  modified_base 14: mod_base = OTHER; note = 2'-O-methyladenosine-3'-phosphate
  modified_base 15: mod_base = OTHER; note = 2'-O-methylcytidine-3'-phosphate
  modified_base 16: mod_base = OTHER; note = 2'-O-methyladenosine-3'-phosphate
  modified_base 17: mod_base = OTHER; note = 2'-O-methyladenosine-3'-phosphate
  modified_base 18: mod_base = OTHER; note = 2'-O-methylguanosine-3'-phosphate
  modified_base 19: mod_base = OTHER; note = 2'-O-methyluridine-3'-phosphorothioate
  modified_base 20: mod_base = OTHER; note = 2'-O-methylcytidine-3'-phosphorothioate
  modified_base 21: mod_base = OTHER; note = 2'-O-methyladenosine
ctcagcatccactacaagtca

SEQ ID NO: 4134 - RNA, 21 nt, synthetic construct
  source 1..21: mol_type = other RNA
  modified_base 1: mod_base = OTHER; note = 2'-O-methylguanosine-3'-phosphorothioate
  modified_base 2: mod_base = OTHER; note = 2'-O-methyluridine-3'-phosphorothioate
  modified_base 3: mod_base = OTHER; note = 2'-O-methylcytidine-3'-phosphate
  modified_base 4: mod_base = OTHER; note = 2'-O-methylcytidine-3'-phosphate
  modified_base 5: mod_base = OTHER; note = 2'-O-methyluridine-3'-phosphate
  modified_base 6: mod_base = OTHER; note = 2'-O-hexadecyl-cytidine-3'-phosphate
  modified_base 7: mod_base = OTHER; note = 2'-deoxy-2'-fluoroadenosine-3'-phosphate
  modified_base 8: mod_base = OTHER; note = 2'-O-methylcytidine-3'-phosphate
  modified_base 9: mod_base = OTHER; note = 2'-deoxy-2'-fluorouridine-3'-phosphate
  modified_base 10: mod_base = OTHER; note = 2'-deoxy-2'-fluoroguanosine-3'-phosphate
  modified_base 11: mod_base = OTHER; note = 2'-deoxy-2'-fluorouridine-3'-phosphate
  modified_base 12: mod_base = OTHER; note = 2'-O-methylcytidine-3'-phosphate
  modified_base 13: mod_base = OTHER; note = 2'-O-methyladenosine-3'-phosphate
  modified_base 14: mod_base = OTHER; note = 2'-O-methylcytidine-3'-phosphate
  modified_base 15: mod_base = OTHER; note = 2'-O-methylcytidine-3'-phosphate
  modified_base 16: mod_base = OTHER; note = 2'-O-methyladenosine-3'-phosphate
  modified_base 17: mod_base = OTHER; note = 2'-O-methyluridine-3'-phosphate
  modified_base 18: mod_base = OTHER; note = 2'-O-methylguanosine-3'-phosphate
  modified_base 19: mod_base = OTHER; note = 2'-O-methylguanosine-3'-phosphorothioate
  modified_base 20: mod_base = OTHER; note = 2'-O-methyluridine-3'-phosphorothioate
  modified_base 21: mod_base = OTHER; note = 2'-O-methyladenosine
gtcctcactgtcaccatggta

SEQ ID NO: 4135 - RNA, 21 nt, synthetic construct
  source 1..21: mol_type = other RNA
  modified_base 1: mod_base = OTHER; note = 2'-O-methylcytidine-3'-phosphorothioate
  modified_base 2: mod_base = OTHER; note = 2'-O-methylcytidine-3'-phosphorothioate
  modified_base 3: mod_base = OTHER; note = 2'-O-methyluridine-3'-phosphate
  modified_base 4: mod_base = OTHER; note = 2'-O-methylguanosine-3'-phosphate
  modified_base 5: mod_base = OTHER; note = 2'-O-methyladenosine-3'-phosphate
  modified_base 6: mod_base = OTHER; note = 2'-O-hexadecyl-uridine-3'-phosphate
  modified_base 7: mod_base = OTHER; note = 2'-deoxy-2'-fluorocytidine-3'-phosphate
  modified_base 8: mod_base = OTHER; note = 2'-O-methylcytidine-3'-phosphate
  modified_base 9: mod_base = OTHER; note = 2'-deoxy-2'-fluorouridine-3'-phosphate
  modified_base 10: mod_base = OTHER; note = 2'-deoxy-2'-fluoroguanosine-3'-phosphate
  modified_base 11: mod_base = OTHER; note = 2'-deoxy-2'-fluorouridine-3'-phosphate
  modified_base 12: mod_base = OTHER; note = 2'-O-methyluridine-3'-phosphate
  modified_base 13: mod_base = OTHER; note = 2'-O-methyluridine-3'-phosphate
  modified_base 14: mod_base = OTHER; note = 2'-O-methylguanosine-3'-phosphate
  modified_base 15: mod_base = OTHER; note = 2'-O-methyladenosine-3'-phosphate
  modified_base 16: mod_base = OTHER; note = 2'-O-methylcytidine-3'-phosphate
  modified_base 17: mod_base = OTHER; note = 2'-O-methylcytidine-3'-phosphate
  modified_base 18: mod_base = OTHER; note = 2'-O-methyladenosine-3'-phosphate
  modified_base 19: mod_base = OTHER; note = 2'-O-methyladenosine-3'-phosphorothioate
  modified_base 20: mod_base = OTHER; note = 2'-O-methyladenosine-3'-phosphorothioate
  modified_base 21: mod_base = OTHER; note = 2'-O-methyladenosine
cctgatcctgtttgaccaaaa

SEQ ID NO: 4136 - RNA, 21 nt, synthetic construct
  source 1..21: mol_type = other RNA
  modified_base 1: mod_base = OTHER; note = 2'-O-methyladenosine-3'-phosphorothioate
  modified_base 2: mod_base = OTHER; note = 2'-O-methylguanosine-3'-phosphorothioate
  modified_base 3: mod_base = OTHER; note = 2'-O-methylcytidine-3'-phosphate
  modified_base 4: mod_base = OTHER; note = 2'-O-methylguanosine-3'-phosphate
  modified_base 5: mod_base = OTHER; note = 2'-O-methylguanosine-3'-phosphate
  modified_base 6: mod_base = OTHER; note = 2'-O-hexadecyl-uridine-3'-phosphate
  modified_base 7: mod_base = OTHER; note = 2'-deoxy-2'-fluorouridine-3'-phosphate
  modified_base 8: mod_base = OTHER; note = 2'-O-methyluridine-3'-phosphate
  modified_base 9: mod_base = OTHER; note = 2'-deoxy-2'-fluorocytidine-3'-phosphate
  modified_base 10: mod_base = OTHER; note = 2'-deoxy-2'-fluoroadenosine-3'-phosphate
  modified_base 11: mod_base = OTHER; note = 2'-deoxy-2'-fluoroguanosine-3'-phosphate
  modified_base 12: mod_base = OTHER; note = 2'-O-methylcytidine-3'-phosphate
  modified_base 13: mod_base = OTHER; note = 2'-O-methyladenosine-3'-phosphate
  modified_base 14: mod_base = OTHER; note = 2'-O-methyladenosine-3'-phosphate
  modified_base 15: mod_base = OTHER; note = 2'-O-methylguanosine-3'-phosphate
  modified_base 16: mod_base = OTHER; note = 2'-O-methyladenosine-3'-phosphate
  modified_base 17: mod_base = OTHER; note = 2'-O-methyladenosine-3'-phosphate
  modified_base 18: mod_base = OTHER; note = 2'-O-methylcytidine-3'-phosphate
  modified_base 19: mod_base = OTHER; note = 2'-O-methylguanosine-3'-phosphorothioate
  modified_base 20: mod_base = OTHER; note = 2'-O-methylguanosine-3'-phosphorothioate
  modified_base 21: mod_base = OTHER; note = 2'-O-methyladenosine
agcggtttcagcaagaacgga

SEQ ID NO: 4137 - RNA, 21 nt, synthetic construct
  source 1..21: mol_type = other RNA
  modified_base 1: mod_base = OTHER; note = 2'-O-methylcytidine-3'-phosphorothioate
  modified_base 2: mod_base = OTHER; note = 2'-O-methylguanosine-3'-phosphorothioate
  modified_base 3: mod_base = OTHER; note = 2'-O-methyluridine-3'-phosphate
  modified_base 4: mod_base = OTHER; note = 2'-O-methylguanosine-3'-phosphate
  modified_base 5: mod_base = OTHER; note = 2'-O-methyluridine-3'-phosphate
  modified_base 6: mod_base = OTHER; note = 2'-O-hexadecyl-guanosine-3'-phosphate
  modified_base 7: mod_base = OTHER; note = 2'-deoxy-2'-fluoroguanosine-3'-phosphate
  modified_base 8: mod_base = OTHER; note = 2'-O-methyladenosine-3'-phosphate
  modified_base 9: mod_base = OTHER; note = 2'-deoxy-2'-fluorocytidine-3'-phosphate
  modified_base 10: mod_base = OTHER; note = 2'-deoxy-2'-fluoroadenosine-3'-phosphate
  modified_base 11: mod_base = OTHER; note = 2'-deoxy-2'-fluorouridine-3'-phosphate
  modified_base 12: mod_base = OTHER; note = 2'-O-methyluridine-3'-phosphate
  modified_base 13: mod_base = OTHER; note = 2'-O-methylcytidine-3'-phosphate
  modified_base 14: mod_base = OTHER; note = 2'-O-methylcytidine-3'-phosphate
  modified_base 15: mod_base = OTHER; note = 2'-O-methyluridine-3'-phosphate
  modified_base 16: mod_base = OTHER; note = 2'-O-methylguanosine-3'-phosphate
  modified_base 17: mod_base = OTHER; note = 2'-O-methylcytidine-3'-phosphate
  modified_base 18: mod_base = OTHER; note = 2'-O-methylcytidine-3'-phosphate
  modified_base 19: mod_base = OTHER; note = 2'-O-methylcytidine-3'-phosphorothioate
  modified_base 20: mod_base = OTHER; note = 2'-O-methyluridine-3'-phosphorothioate
  modified_base 21: mod_base = OTHER; note = 2'-O-methyladenosine
cgtgtggacattcctgcccta

SEQ ID NO: 4138 - RNA, 21 nt, synthetic construct
  source 1..21: mol_type = other RNA
  modified_base 1: mod_base = OTHER; note = 2'-O-methylguanosine-3'-phosphorothioate
  modified_base 2: mod_base = OTHER; note = 2'-O-methyluridine-3'-phosphorothioate
  modified_base 3: mod_base = OTHER; note = 2'-O-methylguanosine-3'-phosphate
  modified_base 4: mod_base = OTHER; note = 2'-O-methyladenosine-3'-phosphate
  modified_base 5: mod_base = OTHER; note = 2'-O-methylguanosine-3'-phosphate
  modified_base 6: mod_base = OTHER; note = 2'-O-hexadecyl-cytidine-3'-phosphate
  modified_base 7: mod_base = OTHER; note = 2'-deoxy-2'-fluoroguanosine-3'-phosphate
  modified_base 8: mod_base = OTHER; note = 2'-O-methyluridine-3'-phosphate
  modified_base 9: mod_base = OTHER; note = 2'-deoxy-2'-fluorocytidine-3'-phosphate
  modified_base 10: mod_base = OTHER; note = 2'-deoxy-2'-fluoroadenosine-3'-phosphate
  modified_base 11: mod_base = OTHER; note = 2'-deoxy-2'-fluorocytidine-3'-phosphate
  modified_base 12: mod_base = OTHER; note = 2'-O-methylcytidine-3'-phosphate
  modified_base 13: mod_base = OTHER; note = 2'-O-methyluridine-3'-phosphate
  modified_base 14: mod_base = OTHER; note = 2'-O-methyluridine-3'-phosphate
  modified_base 15: mod_base = OTHER; note = 2'-O-methylcytidine-3'-phosphate
  modified_base 16: mod_base = OTHER; note = 2'-O-methyladenosine-3'-phosphate
  modified_base 17: mod_base = OTHER; note = 2'-O-methyladenosine-3'-phosphate
  modified_base 18: mod_base = OTHER; note = 2'-O-methyluridine-3'-phosphate
  modified_base 19: mod_base = OTHER; note = 2'-O-methylguanosine-3'-phosphorothioate
  modified_base 20: mod_base = OTHER; note = 2'-O-methylguanosine-3'-phosphorothioate
  modified_base 21: mod_base = OTHER; note = 2'-O-methyladenosine
gtgagcgtcaccttcaatgga

SEQ ID NO: 4139 - RNA, 21 nt, synthetic construct
  source 1..21: mol_type = other RNA
  modified_base 1: mod_base = OTHER; note = 2'-O-methyladenosine-3'-phosphorothioate
  modified_base 2: mod_base = OTHER; note = 2'-O-methylguanosine-3'-phosphorothioate
  modified_base 3: mod_base = OTHER; note = 2'-O-methylcytidine-3'-phosphate
  modified_base 4: mod_base = OTHER; note = 2'-O-methylcytidine-3'-phosphate
  modified_base 5: mod_base = OTHER; note = 2'-O-methyluridine-3'-phosphate
  modified_base 6: mod_base = OTHER; note = 2'-O-hexadecyl-cytidine-3'-phosphate
  modified_base 7: mod_base = OTHER; note = 2'-deoxy-2'-fluorouridine-3'-phosphate
  modified_base 8: mod_base = OTHER; note = 2'-O-methyluridine-3'-phosphate
  modified_base 9: mod_base = OTHER; note = 2'-deoxy-2'-fluorocytidine-3'-phosphate
  modified_base 10: mod_base = OTHER; note = 2'-deoxy-2'-fluorocytidine-3'-phosphate
  modified_base 11: mod_base = OTHER; note = 2'-deoxy-2'-fluoroadenosine-3'-phosphate
  modified_base 12: mod_base = OTHER; note = 2'-O-methylcytidine-3'-phosphate
  modified_base 13: mod_base = OTHER; note = 2'-O-methyladenosine-3'-phosphate
  modified_base 14: mod_base = OTHER; note = 2'-O-methyladenosine-3'-phosphate
  modified_base 15: mod_base = OTHER; note = 2'-O-methylcytidine-3'-phosphate
  modified_base 16: mod_base = OTHER; note = 2'-O-methyladenosine-3'-phosphate
  modified_base 17: mod_base = OTHER; note = 2'-O-methyladenosine-3'-phosphate
  modified_base 18: mod_base = OTHER; note = 2'-O-methylcytidine-3'-phosphate
  modified_base 19: mod_base = OTHER; note = 2'-O-methyladenosine-3'-phosphorothioate
  modified_base 20: mod_base = OTHER; note = 2'-O-methylcytidine-3'-phosphorothioate
  modified_base 21: mod_base = OTHER; note = 2'-O-methyladenosine
agcctcttccacaacaacaca

SEQ ID NO: 4140 - RNA, 21 nt, synthetic construct
  source 1..21: mol_type = other RNA
  modified_base 1: mod_base = OTHER; note = 2'-O-methyluridine-3'-phosphorothioate
  modified_base 2: mod_base = OTHER; note = 2'-O-methylguanosine-3'-phosphorothioate
  modified_base 3: mod_base = OTHER; note = 2'-O-methylcytidine-3'-phosphate
  modified_base 4: mod_base = OTHER; note = 2'-O-methyladenosine-3'-phosphate
  modified_base 5: mod_base = OTHER; note = 2'-O-methylcytidine-3'-phosphate
  modified_base 6: mod_base = OTHER; note = 2'-O-hexadecyl-cytidine-3'-phosphate
  modified_base 7: mod_base = OTHER; note = 2'-deoxy-2'-fluoroadenosine-3'-phosphate
  modified_base 8: mod_base = OTHER; note = 2'-O-methyladenosine-3'-phosphate
  modified_base 9: mod_base = OTHER; note = 2'-deoxy-2'-fluorocytidine-3'-phosphate
  modified_base 10: mod_base = OTHER; note = 2'-deoxy-2'-fluoroadenosine-3'-phosphate
  modified_base 11: mod_base = OTHER; note = 2'-deoxy-2'-fluoroadenosine-3'-phosphate
  modified_base 12: mod_base = OTHER; note = 2'-O-methylcytidine-3'-phosphate
  modified_base 13: mod_base = OTHER; note = 2'-O-methylcytidine-3'-phosphate
  modified_base 14: mod_base = OTHER; note = 2'-O-methyladenosine-3'-phosphate
  modified_base 15: mod_base = OTHER; note = 2'-O-methylguanosine-3'-phosphate
  modified_base 16: mod_base = OTHER; note = 2'-O-methyladenosine-3'-phosphate
  modified_base 17: mod_base = OTHER; note = 2'-O-methylguanosine-3'-phosphate
  modified_base 18: mod_base = OTHER; note = 2'-O-methylguanosine-3'-phosphate
  modified_base 19: mod_base = OTHER; note = 2'-O-methylguanosine-3'-phosphorothioate
  modified_base 20: mod_base = OTHER; note = 2'-O-methyladenosine-3'-phosphorothioate
  modified_base 21: mod_base = OTHER; note = 2'-O-methyladenosine
tgcaccaacaaccagagggaa

SEQ ID NO: 4141 - RNA, 21 nt, synthetic construct
  source 1..21: mol_type = other RNA
  modified_base 1: mod_base = OTHER; note = 2'-O-methyluridine-3'-phosphorothioate
  modified_base 2: mod_base = OTHER; note = 2'-O-methylguanosine-3'-phosphorothioate
  modified_base 3: mod_base = OTHER; note = 2'-O-methyluridine-3'-phosphate
  modified_base 4: mod_base = OTHER; note = 2'-O-methylcytidine-3'-phosphate
  modified_base 5: mod_base = OTHER; note = 2'-O-methyluridine-3'-phosphate
  modified_base 6: mod_base = OTHER; note = 2'-O-hexadecyl-cytidine-3'-phosphate
  modified_base 7: mod_base = OTHER; note = 2'-deoxy-2'-fluorocytidine-3'-phosphate
  modified_base 8: mod_base = OTHER; note = 2'-O-methyladenosine-3'-phosphate
  modified_base 9: mod_base = OTHER; note = 2'-deoxy-2'-fluoroguanosine-3'-phosphate
  modified_base 10: mod_base = OTHER; note = 2'-deoxy-2'-fluorocytidine-3'-phosphate
  modified_base 11: mod_base = OTHER; note = 2'-deoxy-2'-fluoroguanosine-3'-phosphate
  modified_base 12: mod_base = OTHER; note = 2'-O-methylguanosine-3'-phosphate
  modified_base 13: mod_base = OTHER; note = 2'-O-methylguanosine-3'-phosphate
  modified_base 14: mod_base = OTHER; note = 2'-O-methyladenosine-3'-phosphate
  modified_base 15: mod_base = OTHER; note = 2'-O-methylcytidine-3'-phosphate
  modified_base 16: mod_base = OTHER; note = 2'-O-methylguanosine-3'-phosphate
  modified_base 17: mod_base = OTHER; note = 2'-O-methylguanosine-3'-phosphate
  modified_base 18: mod_base = OTHER; note = 2'-O-methyladenosine-3'-phosphate
  modified_base 19: mod_base = OTHER; note = 2'-O-methyladenosine-3'-phosphorothioate
  modified_base 20: mod_base = OTHER; note = 2'-O-methylcytidine-3'-phosphorothioate
  modified_base 21: mod_base = OTHER; note = 2'-O-methyladenosine
tgtctccagcgggacggaaca

SEQ ID NO: 4142 - RNA, 21 nt, synthetic construct
  source 1..21: mol_type = other RNA
  modified_base 1: mod_base = OTHER; note = 2'-O-methylcytidine-3'-phosphorothioate
  modified_base 2: mod_base = OTHER; note = 2'-O-methylguanosine-3'-phosphorothioate
  modified_base 3: mod_base = OTHER; note = 2'-O-methylcytidine-3'-phosphate
  modified_base 4: mod_base = OTHER; note = 2'-O-methylcytidine-3'-phosphate
  modified_base 5: mod_base = OTHER; note = 2'-O-methyladenosine-3'-phosphate
  modified_base 6: mod_base = OTHER; note = 2'-O-hexadecyl-guanosine-3'-phosphate
  modified_base 7: mod_base = OTHER; note = 2'-deoxy-2'-fluorouridine-3'-phosphate
  modified_base 8: mod_base = OTHER; note = 2'-O-methyluridine-3'-phosphate
  modified_base 9: mod_base = OTHER; note = 2'-deoxy-2'-fluoroguanosine-3'-phosphate
  modified_base 10: mod_base = OTHER; note = 2'-deoxy-2'-fluorocytidine-3'-phosphate
  modified_base 11: mod_base = OTHER; note = 2'-deoxy-2'-fluoroadenosine-3'-phosphate
  modified_base 12: mod_base = OTHER; note = 2'-O-methyladenosine-3'-phosphate
  modified_base 13: mod_base = OTHER; note = 2'-O-methylguanosine-3'-phosphate
  modified_base 14: mod_base = OTHER; note = 2'-O-methylguanosine-3'-phosphate
  modified_base 15: mod_base = OTHER; note = 2'-O-methyladenosine-3'-phosphate
  modified_base 16: mod_base = OTHER; note = 2'-O-methylcytidine-3'-phosphate
  modified_base 17: mod_base = OTHER; note = 2'-O-methyladenosine-3'-phosphate
  modified_base 18: mod_base = OTHER; note = 2'-O-methyluridine-3'-phosphate
  modified_base 19: mod_base = OTHER; note = 2'-O-methylguanosine-3'-phosphorothioate
  modified_base 20: mod_base = OTHER; note = 2'-O-methylguanosine-3'-phosphorothioate
  modified_base 21: mod_base = OTHER; note = 2'-O-methyladenosine
cgccagttgcaaggacatgga

SEQ ID NO: 4143 - RNA, 21 nt, synthetic construct
  source 1..21: mol_type = other RNA
  modified_base 1: mod_base = OTHER; note = 2'-O-methylcytidine-3'-phosphorothioate
  modified_base 2: mod_base = OTHER; note = 2'-O-methylguanosine-3'-phosphorothioate
  modified_base 3: mod_base = OTHER; note = 2'-O-methyladenosine-3'-phosphate
  modified_base 4: mod_base = OTHER; note = 2'-O-methylcytidine-3'-phosphate
  modified_base 5: mod_base = OTHER; note = 2'-O-methyladenosine-3'-phosphate
  modified_base 6: mod_base = OTHER; note = 2'-O-hexadecyl-guanosine-3'-phosphate
  modified_base 7: mod_base = OTHER; note = 2'-deoxy-2'-fluorocytidine-3'-phosphate
  modified_base 8: mod_base = OTHER; note = 2'-O-methyladenosine-3'-phosphate
  modified_base 9: mod_base = OTHER; note = 2'-deoxy-2'-fluoroguanosine-3'-phosphate
  modified_base 10: mod_base = OTHER; note = 2'-deoxy-2'-fluoroadenosine-3'-phosphate
  modified_base 11: mod_base = OTHER; note = 2'-deoxy-2'-fluoroadenosine-3'-phosphate
  modified_base 12: mod_base = OTHER; note = 2'-O-methyladenosine-3'-phosphate
  modified_base 13: mod_base = OTHER; note = 2'-O-methylguanosine-3'-phosphate
  modified_base 14: mod_base = OTHER; note = 2'-O-methylguanosine-3'-phosphate
  modified_base 15: mod_base = OTHER; note = 2'-O-methyladenosine-3'-phosphate
  modified_base 16: mod_base = OTHER; note = 2'-O-methyluridine-3'-phosphate
  modified_base 17: mod_base = OTHER; note = 2'-O-methylguanosine-3'-phosphate
  modified_base 18: mod_base = OTHER; note = 2'-O-methylguanosine-3'-phosphate
  modified_base 19: mod_base = OTHER; note = 2'-O-methylcytidine-3'-phosphorothioate
  modified_base 20: mod_base = OTHER; note = 2'-O-methyluridine-3'-phosphorothioate
  modified_base 21: mod_base = OTHER; note = 2'-O-methyladenosine
cgacagcagaaaggatggcta

SEQ ID NO: 4144 - RNA, 21 nt, synthetic construct
  source 1..21: mol_type = other RNA
  modified_base 1: mod_base = OTHER; note = 2'-O-methylcytidine-3'-phosphorothioate
  modified_base 2: mod_base = OTHER; note = 2'-O-methylcytidine-3'-phosphorothioate
  modified_base 3: mod_base = OTHER; note = 2'-O-methylguanosine-3'-phosphate
  modified_base 4: mod_base = OTHER; note = 2'-O-methylcytidine-3'-phosphate
  modified_base 5: mod_base = OTHER; note = 2'-O-methyluridine-3'-phosphate
  modified_base 6: mod_base = OTHER; note = 2'-O-hexadecyl-cytidine-3'-phosphate
  modified_base 7: mod_base = OTHER; note = 2'-deoxy-2'-fluorouridine-3'-phosphate
  modified_base 8: mod_base = OTHER; note = 2'-O-methylguanosine-3'-phosphate
  modified_base 9: mod_base = OTHER; note = 2'-deoxy-2'-fluorouridine-3'-phosphate
  modified_base 10: mod_base = OTHER; note = 2'-deoxy-2'-fluoroguanosine-3'-phosphate
  modified_base 11: mod_base = OTHER; note = 2'-deoxy-2'-fluoroadenosine-3'-phosphate
  modified_base 12: mod_base = OTHER; note = 2'-O-methyluridine-3'-phosphate
  modified_base 13: mod_base = OTHER; note = 2'-O-methylcytidine-3'-phosphate
  modified_base 14: mod_base = OTHER; note = 2'-O-methyluridine-3'-phosphate
  modified_base 15: mod_base = OTHER; note = 2'-O-methylguanosine-3'-phosphate
  modified_base 16: mod_base = OTHER; note = 2'-O-methyladenosine-3'-phosphate
  modified_base 17: mod_base = OTHER; note = 2'-O-methyluridine-3'-phosphate
  modified_base 18: mod_base = OTHER; note = 2'-O-methylguanosine-3'-phosphate
  modified_base 19: mod_base = OTHER; note = 2'-O-methylcytidine-3'-phosphorothioate
  modified_base 20: mod_base = OTHER; note = 2'-O-methyluridine-3'-phosphorothioate
  modified_base 21: mod_base = OTHER; note = 2'-O-methyladenosine
ccgctctgtgatctgatgcta

SEQ ID NO: 4145 - RNA, 21 nt, synthetic construct
  source 1..21: mol_type = other RNA
  modified_base 1: mod_base = OTHER; note = 2'-O-methylcytidine-3'-phosphorothioate
  modified_base 2: mod_base = OTHER; note = 2'-O-methyladenosine-3'-phosphorothioate
  modified_base 3: mod_base = OTHER; note = 2'-O-methylguanosine-3'-phosphate
  modified_base 4: mod_base = OTHER; note = 2'-O-methylguanosine-3'-phosphate
  modified_base 5: mod_base = OTHER; note = 2'-O-methyluridine-3'-phosphate
  modified_base 6: mod_base = OTHER; note = 2'-O-hexadecyl-cytidine-3'-phosphate
  modified_base 7: mod_base = OTHER; note = 2'-deoxy-2'-fluorouridine-3'-phosphate
  modified_base 8: mod_base = OTHER; note = 2'-O-methyluridine-3'-phosphate
  modified_base 9: mod_base = OTHER; note = 2'-deoxy-2'-fluorouridine-3'-phosphate
  modified_base 10: mod_base = OTHER; note = 2'-deoxy-2'-fluoroguanosine-3'-phosphate
  modified_base 11: mod_base = OTHER; note = 2'-deoxy-2'-fluorocytidine-3'-phosphate
  modified_base 12: mod_base = OTHER; note = 2'-O-methyluridine-3'-phosphate
  modified_base 13: mod_base = OTHER; note = 2'-O-methylguanosine-3'-phosphate
  modified_base 14: mod_base = OTHER; note = 2'-O-methyladenosine-3'-phosphate
  modified_base 15: mod_base = OTHER; note = 2'-O-methylguanosine-3'-phosphate
  modified_base 16: mod_base = OTHER; note = 2'-O-methyluridine-3'-phosphate
  modified_base 17: mod_base = OTHER; note = 2'-O-methylguanosine-3'-phosphate
  modified_base 18: mod_base = OTHER; note = 2'-O-methylcytidine-3'-phosphate
  modified_base 19: mod_base = OTHER; note = 2'-O-methylcytidine-3'-phosphorothioate
  modified_base 20: mod_base = OTHER; note = 2'-O-methyladenosine-3'-phosphorothioate
  modified_base 21: mod_base = OTHER; note = 2'-O-methyladenosine
caggtctttgctgagtgccaa

SEQ ID NO: 4146 - RNA, 21 nt, synthetic construct
  source 1..21: mol_type = other RNA
  modified_base 1: mod_base = OTHER; note = 2'-O-methylguanosine-3'-phosphorothioate
  modified_base 2: mod_base = OTHER; note = 2'-O-methylguanosine-3'-phosphorothioate
  modified_base 3: mod_base = OTHER; note = 2'-O-methylguanosine-3'-phosphate
  modified_base 4: mod_base = OTHER; note = 2'-O-methylcytidine-3'-phosphate
  modified_base 5: mod_base = OTHER; note = 2'-O-methylcytidine-3'-phosphate
  modified_base 6: mod_base = OTHER; note = 2'-O-hexadecyl-cytidine-3'-phosphate
  modified_base 7: mod_base = OTHER; note = 2'-deoxy-2'-fluoroadenosine-3'-phosphate
  modified_base 8: mod_base = OTHER; note = 2'-O-methyluridine-3'-phosphate
  modified_base 9: mod_base = OTHER; note = 2'-deoxy-2'-fluorouridine-3'-phosphate
  modified_base 10: mod_base = OTHER; note = 2'-deoxy-2'-fluorocytidine-3'-phosphate
  modified_base 11: mod_base = OTHER; note = 2'-deoxy-2'-fluorouridine-3'-phosphate
  modified_base 12: mod_base = OTHER; note = 2'-O-methyluridine-3'-phosphate
  modified_base 13: mod_base = OTHER; note = 2'-O-methylcytidine-3'-phosphate
  modified_base 14: mod_base = OTHER; note = 2'-O-methyladenosine-3'-phosphate
  modified_base 15: mod_base = OTHER; note = 2'-O-methyladenosine-3'-phosphate
  modified_base 16: mod_base = OTHER; note = 2'-O-methylcytidine-3'-phosphate
  modified_base 17: mod_base = OTHER; note = 2'-O-methylguanosine-3'-phosphate
  modified_base 18: mod_base = OTHER; note = 2'-O-methylcytidine-3'-phosphate
  modified_base 19: mod_base = OTHER; note = 2'-O-methylcytidine-3'-phosphorothioate
  modified_base 20: mod_base = OTHER; note = 2'-O-methyluridine-3'-phosphorothioate
  modified_base 21: mod_base = OTHER; note = 2'-O-methyladenosine
gggcccattcttcaacgccta

SEQ ID NO: 4147 - RNA, 21 nt, synthetic construct
  source 1..21: mol_type = other RNA
  modified_base 1: mod_base = OTHER; note = 2'-O-methylguanosine-3'-phosphorothioate
  modified_base 2: mod_base = OTHER; note = 2'-O-methyladenosine-3'-phosphorothioate
  modified_base 3: mod_base = OTHER; note = 2'-O-methylguanosine-3'-phosphate
  modified_base 4: mod_base = OTHER; note = 2'-O-methylguanosine-3'-phosphate
  modified_base 5: mod_base = OTHER; note = 2'-O-methylcytidine-3'-phosphate
  modified_base 6: mod_base = OTHER; note = 2'-O-hexadecyl-uridine-3'-phosphate
  modified_base 7: mod_base = OTHER; note = 2'-deoxy-2'-fluorouridine-3'-phosphate
  modified_base 8: mod_base = OTHER; note = 2'-O-methyladenosine-3'-phosphate
  modified_base 9: mod_base = OTHER; note = 2'-deoxy-2'-fluorocytidine-3'-phosphate
  modified_base 10: mod_base = OTHER; note = 2'-deoxy-2'-fluoroguanosine-3'-phosphate
  modified_base 11: mod_base = OTHER; note = 2'-deoxy-2'-fluorocytidine-3'-phosphate
  modified_base 12: mod_base = OTHER; note = 2'-O-methyladenosine-3'-phosphate
  modified_base 13: mod_base = OTHER; note = 2'-O-methylguanosine-3'-phosphate
  modified_base 14: mod_base = OTHER; note = 2'-O-methyladenosine-3'-phosphate
  modified_base 15: mod_base = OTHER; note = 2'-O-methylguanosine-3'-phosphate
  modified_base 16: mod_base = OTHER; note = 2'-O-methylcytidine-3'-phosphate
  modified_base 17: mod_base = OTHER; note = 2'-O-methyluridine-3'-phosphate
  modified_base 18: mod_base = OTHER; note = 2'-O-methylcytidine-3'-phosphate
  modified_base 19: mod_base = OTHER; note = 2'-O-methyluridine-3'-phosphorothioate
  modified_base 20: mod_base = OTHER; note = 2'-O-methylguanosine-3'-phosphorothioate
  modified_base 21: mod_base = OTHER; note = 2'-O-methyladenosine
gaggcttacgcagagctctga

SEQ ID NO: 4148 - RNA, 21 nt, synthetic construct
  source 1..21: mol_type = other RNA
  modified_base 1: mod_base = OTHER; note = 2'-O-methyladenosine-3'-phosphorothioate
  modified_base 2: mod_base = OTHER; note = 2'-O-methylguanosine-3'-phosphorothioate
  modified_base 3: mod_base = OTHER; note = 2'-O-methyluridine-3'-phosphate
  modified_base 4: mod_base = OTHER; note = 2'-O-methylguanosine-3'-phosphate
  modified_base 5: mod_base = OTHER; note = 2'-O-methyluridine-3'-phosphate
  modified_base 6: mod_base = OTHER; note = 2'-O-hexadecyl-guanosine-3'-phosphate
  modified_base 7: mod_base = OTHER; note = 2'-deoxy-2'-fluorocytidine-3'-phosphate
  modified_base 8: mod_base = OTHER; note = 2'-O-methyladenosine-3'-phosphate
  modified_base 9: mod_base = OTHER; note = 2'-deoxy-2'-fluoroguanosine-3'-phosphate
  modified_base 10: mod_base = OTHER; note = 2'-deoxy-2'-fluorouridine-3'-phosphate
  modified_base 11: mod_base = OTHER; note = 2'-deoxy-2'-fluoroguanosine-3'-phosphate
  modified_base 12: mod_base = OTHER; note = 2'-O-methyladenosine-3'-phosphate
  modified_base 13: mod_base = OTHER; note = 2'-O-methylcytidine-3'-phosphate
  modified_base 14: mod_base = OTHER; note = 2'-O-methyluridine-3'-phosphate
  modified_base 15: mod_base = OTHER; note = 2'-O-methylguanosine-3'-phosphate
  modified_base 16: mod_base = OTHER; note = 2'-O-methylguanosine-3'-phosphate
  modified_base 17: mod_base = OTHER; note = 2'-O-methylcytidine-3'-phosphate
  modified_base 18: mod_base = OTHER; note = 2'-O-methylguanosine-3'-phosphate
  modified_base 19: mod_base = OTHER; note = 2'-O-methyladenosine-3'-phosphorothioate
  modified_base 20: mod_base = OTHER; note = 2'-O-methylguanosine-3'-phosphorothioate
  modified_base 21: mod_base = OTHER; note = 2'-O-methyladenosine
agtgtgcagtgactggcgaga

SEQ ID NO: 4149 - RNA, 21 nt, synthetic construct
  source 1..21: mol_type = other RNA
  modified_base 1: mod_base = OTHER; note = 2'-O-methylcytidine-3'-phosphorothioate
  modified_base 2: mod_base = OTHER; note = 2'-O-methylcytidine-3'-phosphorothioate
  modified_base 3: mod_base = OTHER; note = 2'-O-methyladenosine-3'-phosphate
  modified_base 4: mod_base = OTHER; note = 2'-O-methylcytidine-3'-phosphate
  modified_base 5: mod_base = OTHER; note = 2'-O-methylcytidine-3'-phosphate
  modified_base 6: mod_base = OTHER; note = 2'-O-hexadecyl-adenosine-3'-phosphate
  modified_base 7: mod_base = OTHER; note = 2'-deoxy-2'-fluoroadenosine-3'-phosphate
  modified_base 8: mod_base = OTHER; note = 2'-O-methyladenosine-3'-phosphate
  modified_base 9: mod_base = OTHER; note = 2'-deoxy-2'-fluoroguanosine-3'-phosphate
  modified_base 10: mod_base = OTHER; note = 2'-deoxy-2'-fluorouridine-3'-phosphate
  modified_base 11: mod_base = OTHER; note = 2'-deoxy-2'-fluoroguanosine-3'-phosphate
  modified_base 12: mod_base = OTHER; note = 2'-O-methyluridine-3'-phosphate
  modified_base 13: mod_base = OTHER; note = 2'-O-methyladenosine-3'-phosphate
  modified_base 14: mod_base = OTHER; note = 2'-O-methylcytidine-3'-phosphate
  modified_base 15: mod_base = OTHER; note = 2'-O-methyladenosine-3'-phosphate
  modified_base 16: mod_base = OTHER; note = 2'-O-methyladenosine-3'-phosphate
  modified_base 17: mod_base = OTHER; note = 2'-O-methylguanosine-3'-phosphate
  modified_base 18: mod_base = OTHER; note = 2'-O-methylcytidine-3'-phosphate
  modified_base 19: mod_base = OTHER; note = 2'-O-methylcytidine-3'-phosphorothioate
  modified_base 20: mod_base = OTHER; note = 2'-O-methyladenosine-3'-phosphorothioate
  modified_base 21: mod_base = OTHER; note = 2'-O-methyladenosine
ccaccaaagtgtacaagccaa

SEQ ID NO: 4150 - RNA, 21 nt, synthetic construct
  source 1..21: mol_type = other RNA
  modified_base 1: mod_base = OTHER; note = 2'-O-methylcytidine-3'-phosphorothioate
  modified_base 2: mod_base = OTHER; note = 2'-O-methyluridine-3'-phosphorothioate
  modified_base 3: mod_base = OTHER; note = 2'-O-methylguanosine-3'-phosphate
  modified_base 4: mod_base = OTHER; note = 2'-O-methylcytidine-3'-phosphate
  modified_base 5: mod_base = OTHER; note = 2'-O-methyladenosine-3'-phosphate
  modified_base 6: mod_base = OTHER; note = 2'-O-hexadecyl-adenosine-3'-phosphate
  modified_base 7: mod_base = OTHER; note = 2'-deoxy-2'-fluorocytidine-3'-phosphate
  modified_base 8: mod_base = OTHER; note = 2'-O-methyluridine-3'-phosphate
  modified_base 9: mod_base = OTHER; note = 2'-deoxy-2'-fluorocytidine-3'-phosphate
  modified_base 10: mod_base = OTHER; note = 2'-deoxy-2'-fluorouridine-3'-phosphate
  modified_base 11: mod_base = OTHER; note = 2'-deoxy-2'-fluoroadenosine-3'-phosphate
  modified_base 12: mod_base = OTHER; note = 2'-O-methylguanosine-3'-phosphate
  modified_base 13: mod_base = OTHER; note = 2'-O-methylguanosine-3'-phosphate
  modified_base 14: mod_base = OTHER; note = 2'-O-methyladenosine-3'-phosphate
  modified_base 15: mod_base = OTHER; note = 2'-O-methyladenosine-3'-phosphate
  modified_base 16: mod_base = OTHER; note = 2'-O-methylcytidine-3'-phosphate
  modified_base 17: mod_base = OTHER; note = 2'-O-methylcytidine-3'-phosphate
  modified_base 18: mod_base = OTHER; note = 2'-O-methyladenosine-3'-phosphate
  modified_base 19: mod_base = OTHER; note = 2'-O-methylguanosine-3'-phosphorothioate
  modified_base 20: mod_base = OTHER; note = 2'-O-methyladenosine-3'-phosphorothioate
  modified_base 21: mod_base = OTHER; note = 2'-O-methyladenosine
ctgcaactctaggaaccagaa

SEQ ID NO: 4151 - RNA, 21 nt, synthetic construct
  source 1..21: mol_type = other RNA
  modified_base 1: mod_base = OTHER; note = 2'-O-methylcytidine-3'-phosphorothioate
  modified_base 2: mod_base = OTHER; note = 2'-O-methyladenosine-3'-phosphorothioate
  modified_base 3: mod_base = OTHER; note = 2'-O-methylguanosine-3'-phosphate
  modified_base 4: mod_base = OTHER; note = 2'-O-methyladenosine-3'-phosphate
  modified_base 5: mod_base = OTHER; note = 2'-O-methyluridine-3'-phosphate
  modified_base 6: mod_base = OTHER; note = 2'-O-hexadecyl-cytidine-3'-phosphate
  modified_base 7: mod_base = OTHER; note = 2'-deoxy-2'-fluorocytidine-3'-phosphate
  modified_base 8: mod_base = OTHER; note = 2'-O-methyluridine-3'-phosphate
  modified_base 9: mod_base = OTHER; note = 2'-deoxy-2'-fluorocytidine-3'-phosphate
  modified_base 10: mod_base = OTHER; note = 2'-deoxy-2'-fluorouridine-3'-phosphate
  modified_base 11: mod_base = OTHER; note = 2'-deoxy-2'-fluorouridine-3'-phosphate
  modified_base 12: mod_base = OTHER; note = 2'-O-methylcytidine-3'-phosphate
  modified_base 13: mod_base = OTHER; note = 2'-O-methyladenosine-3'-phosphate
  modified_base 14: mod_base = OTHER; note = 2'-O-methyladenosine-3'-phosphate
  modified_base 15: mod_base = OTHER; note = 2'-O-methylcytidine-3'-phosphate
  modified_base 16: mod_base = OTHER; note = 2'-O-methylguanosine-3'-phosphate
  modified_base 17: mod_base = OTHER; note = 2'-O-methylcytidine-3'-phosphate
  modified_base 18: mod_base = OTHER; note = 2'-O-methyladenosine-3'-phosphate
  modified_base 19: mod_base = OTHER; note = 2'-O-methylcytidine-3'-phosphorothioate
  modified_base 20: mod_base = OTHER; note = 2'-O-methyladenosine-3'-phosphorothioate
  modified_base 21: mod_base = OTHER; note = 2'-O-methyladenosine
cagatcctcttcaacgcacaa

SEQ ID NO: 4152 - RNA, 21 nt, synthetic construct
  source 1..21: mol_type = other RNA
  modified_base 1: mod_base = OTHER; note = 2'-O-methylguanosine-3'-phosphorothioate
  modified_base 2: mod_base = OTHER; note = 2'-O-methylguanosine-3'-phosphorothioate
  modified_base 3: mod_base = OTHER; note = 2'-O-methylguanosine-3'-phosphate
  modified_base 4: mod_base = OTHER; note = 2'-O-methylcytidine-3'-phosphate
  modified_base 5: mod_base = OTHER; note = 2'-O-methyladenosine-3'-phosphate
  modified_base 6: mod_base = OTHER; note = 2'-O-hexadecyl-uridine-3'-phosphate
  modified_base 7: mod_base = OTHER; note = 2'-deoxy-2'-fluorocytidine-3'-phosphate
  modified_base 8: mod_base = OTHER; note = 2'-O-methyluridine-3'-phosphate
  modified_base 9: mod_base = OTHER; note = 2'-deoxy-2'-fluoroguanosine-3'-phosphate
  modified_base 10: mod_base = OTHER; note = 2'-deoxy-2'-fluorocytidine-3'-phosphate
  modified_base 11: mod_base = OTHER; note = 2'-deoxy-2'-fluoroguanosine-3'-phosphate
  modified_base 12: mod_base = OTHER; note = 2'-O-methyluridine-3'-phosphate
  modified_base 13: mod_base = OTHER; note = 2'-O-methylguanosine-3'-phosphate
  modified_base 14: mod_base = OTHER; note = 2'-O-methylcytidine-3'-phosphate
  modified_base 15: mod_base = OTHER; note = 2'-O-methyladenosine-3'-phosphate
  modified_base 16: mod_base = OTHER; note = 2'-O-methylguanosine-3'-phosphate
  modified_base 17: mod_base = OTHER; note = 2'-O-methylguanosine-3'-phosphate
  modified_base 18: mod_base = OTHER; note = 2'-O-methylcytidine-3'-phosphate
  modified_base 19: mod_base = OTHER; note = 2'-O-methylcytidine-3'-phosphorothioate
  modified_base 20: mod_base = OTHER; note = 2'-O-methyluridine-3'-phosphorothioate
  modified_base 21: mod_base = OTHER; note = 2'-O-methyladenosine
gggcatctgcgtgcaggccta

SEQ ID NO: 4153 - RNA, 21 nt, synthetic construct
  source 1..21: mol_type = other RNA
  modified_base 1: mod_base = OTHER; note = 2'-O-methylcytidine-3'-phosphorothioate
  modified_base 2: mod_base = OTHER; note = 2'-O-methylguanosine-3'-phosphorothioate
  modified_base 3: mod_base = OTHER; note = 2'-O-methyladenosine-3'-phosphate
  modified_base 4: mod_base = OTHER; note = 2'-O-methyluridine-3'-phosphate
  modified_base 5: mod_base = OTHER; note = 2'-O-methylguanosine-3'-phosphate
  modified_base 6: mod_base = OTHER; note = 2'-O-hexadecyl-guanosine-3'-phosphate
  modified_base 7: mod_base = OTHER; note = 2'-deoxy-2'-fluoroguanosine-3'-phosphate
  modified_base 8: mod_base = OTHER; note = 2'-O-methyluridine-3'-phosphate
  modified_base 9: mod_base = OTHER; note = 2'-deoxy-2'-fluorouridine-3'-phosphate
  modified_base 10: mod_base = OTHER; note = 2'-deoxy-2'-fluorouridine-3'-phosphate
  modified_base 11: mod_base = OTHER; note = 2'-deoxy-2'-fluorocytidine-3'-phosphate
  modified_base 12: mod_base = OTHER; note = 2'-O-methylcytidine-3'-phosphate
  modified_base 13: mod_base = OTHER; note = 2'-O-methyluridine-3'-phosphate
  modified_base 14: mod_base = OTHER; note = 2'-O-methyladenosine-3'-phosphate
  modified_base 15: mod_base = OTHER; note = 2'-O-methyladenosine-3'-phosphate
  modified_base 16: mod_base = OTHER; note = 2'-O-methyladenosine-3'-phosphate
  modified_base 17: mod_base = OTHER; note = 2'-O-methyluridine-3'-phosphate
  modified_base 18: mod_base = OTHER; note = 2'-O-methyluridine-3'-phosphate
  modified_base 19: mod_base = OTHER; note = 2'-O-methyluridine-3'-phosphorothioate
  modified_base 20: mod_base = OTHER; note = 2'-O-methylcytidine-3'-phosphorothioate
  modified_base 21: mod_base = OTHER; note = 2'-O-methyladenosine
cgatgggtttcctaaatttca

SEQ ID NO: 4154 - RNA, 21 nt, synthetic construct
  source 1..21: mol_type = other RNA
  modified_base 1: mod_base = OTHER; note = 2'-O-methylguanosine-3'-phosphorothioate
  modified_base 2: mod_base = OTHER; note = 2'-O-methylguanosine-3'-phosphorothioate
  modified_base 3: mod_base = OTHER; note = 2'-O-methyluridine-3'-phosphate
  modified_base 4: mod_base = OTHER; note = 2'-O-methylcytidine-3'-phosphate
  modified_base 5: mod_base = OTHER; note = 2'-O-methyladenosine-3'-phosphate
  modified_base 6: mod_base = OTHER; note = 2'-O-hexadecyl-guanosine-3'-phosphate
  modified_base 7: mod_base = OTHER; note = 2'-deoxy-2'-fluorocytidine-3'-phosphate
  modified_base 8: mod_base = OTHER; note = 2'-O-methyladenosine-3'-phosphate
  modified_base 9: mod_base = OTHER; note = 2'-deoxy-2'-fluoroadenosine-3'-phosphate
  modified_base 10: mod_base = OTHER; note = 2'-deoxy-2'-fluorocytidine-3'-phosphate
  modified_base 11: mod_base = OTHER; note = 2'-deoxy-2'-fluorouridine-3'-phosphate
  modified_base 12: mod_base = OTHER; note = 2'-O-methylguanosine-3'-phosphate
  modified_base 13: mod_base = OTHER; note = 2'-O-methylcytidine-3'-phosphate
  modified_base 14: mod_base = OTHER; note = 2'-O-methylcytidine-3'-phosphate
  modified_base 15: mod_base = OTHER; note = 2'-O-methyladenosine-3'-phosphate
  modified_base 16: mod_base = OTHER; note = 2'-O-methylguanosine-3'-phosphate
  modified_base 17: mod_base = OTHER; note = 2'-O-methyluridine-3'-phosphate
  modified_base 18: mod_base = OTHER; note = 2'-O-methylcytidine-3'-phosphate
  modified_base 19: mod_base = OTHER; note = 2'-O-methylcytidine-3'-phosphorothioate
  modified_base 20: mod_base = OTHER; note = 2'-O-methyluridine-3'-phosphorothioate
  modified_base 21: mod_base = OTHER; note = 2'-O-methyladenosine
ggtcagcaactgccagtccta

SEQ ID NO: 4155 - RNA, 21 nt, synthetic construct
  source 1..21: mol_type = other RNA
  modified_base 1: mod_base = OTHER; note = 2'-O-methylguanosine-3'-phosphorothioate
  modified_base 2: mod_base = OTHER; note = 2'-O-methyladenosine-3'-phosphorothioate
  modified_base 3: mod_base = OTHER; note = 2'-O-methylguanosine-3'-phosphate
  modified_base 4: mod_base = OTHER; note = 2'-O-methylguanosine-3'-phosphate
  modified_base 5: mod_base = OTHER; note = 2'-O-methylguanosine-3'-phosphate
  modified_base 6: mod_base = OTHER; note = 2'-O-hexadecyl-uridine-3'-phosphate
  modified_base 7: mod_base = OTHER; note = 2'-deoxy-2'-fluorouridine-3'-phosphate
  modified_base 8: mod_base = OTHER; note = 2'-O-methylcytidine-3'-phosphate
  modified_base 9: mod_base = OTHER; note = 2'-deoxy-2'-fluoroadenosine-3'-phosphate
  modified_base 10: mod_base = OTHER; note = 2'-deoxy-2'-fluoroguanosine-3'-phosphate
  modified_base 11: mod_base = OTHER; note = 2'-deoxy-2'-fluorouridine-3'-phosphate
  modified_base 12: mod_base = OTHER; note = 2'-O-methylguanosine-3'-phosphate
  modified_base 13: mod_base = OTHER; note = 2'-O-methyluridine-3'-phosphate
  modified_base 14: mod_base = OTHER; note = 2'-O-methylcytidine-3'-phosphate
  modified_base 15: mod_base = OTHER; note = 2'-O-methylguanosine-3'-phosphate
  modified_base 16: mod_base = OTHER; note = 2'-O-methylguanosine-3'-phosphate
  modified_base 17: mod_base = OTHER; note = 2'-O-methyluridine-3'-phosphate
  modified_base 18: mod_base = OTHER; note = 2'-O-methylguanosine-3'-phosphate
  modified_base 19: mod_base = OTHER; note = 2'-O-methylcytidine-3'-phosphorothioate
  modified_base 20: mod_base = OTHER; note = 2'-O-methyladenosine-3'-phosphorothioate
  modified_base 21: mod_base = OTHER; note = 2'-O-methyladenosine
gagggttcagtgtcggtgcaa

SEQ ID NO: 4156 - RNA, 21 nt, synthetic construct
  source 1..21: mol_type = other RNA
  modified_base 1: mod_base = OTHER; note = 2'-O-methylcytidine-3'-phosphorothioate
  modified_base 2: mod_base = OTHER; note = 2'-O-methylguanosine-3'-phosphorothioate
  modified_base 3: mod_base = OTHER; note = 2'-O-methylguanosine-3'-phosphate
  modified_base 4: mod_base = OTHER; note = 2'-O-methylcytidine-3'-phosphate
  modified_base 5: mod_base = OTHER; note = 2'-O-methyluridine-3'-phosphate
  modified_base 6: mod_base = OTHER; note = 2'-O-hexadecyl-uridine-3'-phosphate
  modified_base 7: mod_base = OTHER; note = 2'-deoxy-2'-fluorocytidine-3'-phosphate
  modified_base 8: mod_base = OTHER; note = 2'-O-methylguanosine-3'-phosphate
  modified_base 9: mod_base = OTHER; note = 2'-deoxy-2'-fluorouridine-3'-phosphate
  modified_base 10: mod_base = OTHER; note = 2'-deoxy-2'-fluoroadenosine-3'-phosphate
  modified_base 11: mod_base = OTHER; note = 2'-deoxy-2'-fluoroadenosine-3'-phosphate
  modified_base 12: mod_base = OTHER; note = 2'-O-methylcytidine-3'-phosphate
  modified_base 13: mod_base = OTHER; note = 2'-O-methylcytidine-3'-phosphate
  modified_base 14: mod_base = OTHER; note = 2'-O-methylguanosine-3'-phosphate
  modified_base 15: mod_base = OTHER; note = 2'-O-methyluridine-3'-phosphate
  modified_base 16: mod_base = OTHER; note = 2'-O-methylguanosine-3'-phosphate
  modified_base 17: mod_base = OTHER; note = 2'-O-methyladenosine-3'-phosphate
  modified_base 18: mod_base = OTHER; note = 2'-O-methylcytidine-3'-phosphate
  modified_base 19: mod_base = OTHER; note = 2'-O-methylcytidine-3'-phosphorothioate
  modified_base 20: mod_base = OTHER; note = 2'-O-methyladenosine-3'-phosphorothioate
  modified_base 21: mod_base = OTHER; note = 2'-O-methyladenosine
cggcttcgtaaccgtgaccaa

SEQ ID NO: 4157 - RNA, 21 nt, synthetic construct
  source 1..21: mol_type = other RNA
  modified_base 1: mod_base = OTHER; note = 2'-O-methylcytidine-3'-phosphorothioate
  modified_base 2: mod_base = OTHER; note = 2'-O-methylguanosine-3'-phosphorothioate
  modified_base 3: mod_base = OTHER; note = 2'-O-methyluridine-3'-phosphate
  modified_base 4: mod_base = OTHER; note = 2'-O-methylguanosine-3'-phosphate
  modified_base 5: mod_base = OTHER; note = 2'-O-methyluridine-3'-phosphate
  modified_base 6: mod_base = OTHER; note = 2'-O-hexadecyl-guanosine-3'-phosphate
  modified_base 7: mod_base = OTHER; note = 2'-deoxy-2'-fluorocytidine-3'-phosphate
  modified_base 8: mod_base = OTHER; note = 2'-O-methyladenosine-3'-phosphate
  modified_base 9: mod_base = OTHER; note = 2'-deoxy-2'-fluoroadenosine-3'-phosphate
  modified_base 10: mod_base = OTHER; note = 2'-deoxy-2'-fluorocytidine-3'-phosphate
  modified_base 11: mod_base = OTHER; note = 2'-deoxy-2'-fluoroadenosine-3'-phosphate
  modified_base 12: mod_base = OTHER; note = 2'-O-methylcytidine-3'-phosphate
  modified_base 13: mod_base = OTHER; note = 2'-O-methyladenosine-3'-phosphate
  modified_base 14: mod_base = OTHER; note = 2'-O-methyladenosine-3'-phosphate
  modified_base 15: mod_base = OTHER; note = 2'-O-methylcytidine-3'-phosphate
  modified_base 16: mod_base = OTHER; note = 2'-O-methylcytidine-3'-phosphate
  modified_base 17: mod_base = OTHER; note = 2'-O-methyladenosine-3'-phosphate
  modified_base 18: mod_base = OTHER; note = 2'-O-methylcytidine-3'-phosphate
  modified_base 19: mod_base = OTHER; note = 2'-O-methylcytidine-3'-phosphorothioate
  modified_base 20: mod_base = OTHER; note = 2'-O-methyluridine-3'-phosphorothioate
  modified_base 21: mod_base = OTHER; note = 2'-O-methyladenosine
cgtgtgcaacacaaccaccta

SEQ ID NO: 4158 - RNA, 21 nt, synthetic construct
  source 1..21: mol_type = other RNA
  modified_base 1: mod_base = OTHER; note = 2'-O-methylcytidine-3'-phosphorothioate
  modified_base 2: mod_base = OTHER; note = 2'-O-methyladenosine-3'-phosphorothioate
  modified_base 3: mod_base = OTHER; note = 2'-O-methylguanosine-3'-phosphate
  modified_base 4: mod_base = OTHER; note = 2'-O-methylguanosine-3'-phosphate
  modified_base 5: mod_base = OTHER; note = 2'-O-methyladenosine-3'-phosphate
  modified_base 6: mod_base = OTHER; note = 2'-O-hexadecyl-guanosine-3'-phosphate
  modified_base 7: mod_base = OTHER; note = 2'-deoxy-2'-fluorouridine-3'-phosphate
  modified_base 8: mod_base = OTHER; note = 2'-O-methylcytidine-3'-phosphate
  modified_base 9: mod_base = OTHER; note = 2'-deoxy-2'-fluorocytidine-3'-phosphate
  modified_base 10: mod_base = OTHER; note = 2'-deoxy-2'-fluoroadenosine-3'-phosphate
  modified_base 11: mod_base = OTHER; note = 2'-deoxy-2'-fluorouridine-3'-phosphate
  modified_base 12: mod_base = OTHER; note = 2'-O-methylcytidine-3'-phosphate
  modified_base 13: mod_base = OTHER; note = 2'-O-methyluridine-3'-phosphate
  modified_base 14: mod_base = OTHER; note = 2'-O-methylguanosine-3'-phosphate
  modified_base 15: mod_base = OTHER; note = 2'-O-methylcytidine-3'-phosphate
  modified_base 16: mod_base = OTHER; note = 2'-O-methyladenosine-3'-phosphate
  modified_base 17: mod_base = OTHER; note = 2'-O-methylcytidine-3'-phosphate
  modified_base 18: mod_base = OTHER; note = 2'-O-methylcytidine-3'-phosphate
  modified_base 19: mod_base = OTHER; note = 2'-O-methylcytidine-3'-phosphorothioate
  modified_base 20: mod_base = OTHER; note = 2'-O-methyladenosine-3'-phosphorothioate
  modified_base 21: mod_base = OTHER; note = 2'-O-methyladenosine
caggagtccatctgcacccaa

SEQ ID NO: 4159 - RNA, 21 nt, synthetic construct
  source 1..21: mol_type = other RNA
  modified_base 1: mod_base = OTHER; note = 2'-O-methylcytidine-3'-phosphorothioate
  modified_base 2: mod_base = OTHER; note = 2'-O-methyluridine-3'-phosphorothioate
  modified_base 3: mod_base = OTHER; note = 2'-O-methylguanosine-3'-phosphate
  modified_base 4: mod_base = OTHER; note = 2'-O-methyluridine-3'-phosphate
  modified_base 5: mod_base = OTHER; note = 2'-O-methylcytidine-3'-phosphate
  modified_base 6: mod_base = OTHER; note = 2'-O-hexadecyl-cytidine-3'-phosphate
  modified_base 7: mod_base = OTHER; note = 2'-deoxy-2'-fluorocytidine-3'-phosphate
  modified_base 8: mod_base = OTHER; note = 2'-O-methyladenosine-3'-phosphate
  modified_base 9: mod_base = OTHER; note = 2'-deoxy-2'-fluorocytidine-3'-phosphate
  modified_base 10: mod_base = OTHER; note = 2'-deoxy-2'-fluorocytidine-3'-phosphate
  modified_base 11: mod_base = OTHER; note = 2'-deoxy-2'-fluorouridine-3'-phosphate
  modified_base 12: mod_base = OTHER; note = 2'-O-methyluridine-3'-phosphate
  modified_base 13: mod_base = OTHER; note = 2'-O-methylcytidine-3'-phosphate
  modified_base 14: mod_base = OTHER; note = 2'-O-methylcytidine-3'-phosphate
  modified_base 15: mod_base = OTHER; note = 2'-O-methylguanosine-3'-phosphate
  modified_base 16: mod_base = OTHER; note = 2'-O-methylcytidine-3'-phosphate
  modified_base 17: mod_base = OTHER; note = 2'-O-methyluridine-3'-phosphate
  modified_base 18: mod_base = OTHER; note = 2'-O-methylguanosine-3'-phosphate
  modified_base 19: mod_base = OTHER; note = 2'-O-methylcytidine-3'-phosphorothioate
  modified_base 20: mod_base = OTHER; note = 2'-O-methyladenosine-3'-phosphorothioate
  modified_base 21: mod_base = OTHER; note = 2'-O-methyladenosine
ctgtcccaccttccgctgcaa

SEQ ID NO: 4160 - RNA, 21 nt, synthetic construct
  source 1..21: mol_type = other RNA
  modified_base 1: mod_base = OTHER; note = 2'-O-methyluridine-3'-phosphorothioate
  modified_base 2: mod_base = OTHER; note = 2'-O-methylcytidine-3'-phosphorothioate
  modified_base 3: mod_base = OTHER; note = 2'-O-methyladenosine-3'-phosphate
  modified_base 4: mod_base = OTHER; note = 2'-O-methylguanosine-3'-phosphate
  modified_base 5: mod_base = OTHER; note = 2'-O-methylcytidine-3'-phosphate
  modified_base 6: mod_base = OTHER; note = 2'-O-hexadecyl-uridine-3'-phosphate
  modified_base 7: mod_base = OTHER; note = 2'-deoxy-2'-fluoroguanosine-3'-phosphate
  modified_base 8: mod_base = OTHER; note = 2'-O-methyluridine-3'-phosphate
  modified_base 9: mod_base = OTHER; note = 2'-deoxy-2'-fluoroguanosine-3'-phosphate
  modified_base 10: mod_base = OTHER; note = 2'-deoxy-2'-fluorouridine-3'-phosphate
  modified_base 11: mod_base = OTHER; note = 2'-deoxy-2'-fluorouridine-3'-phosphate
  modified_base 12: mod_base = OTHER; note = 2'-O-methylcytidine-3'-phosphate
  modified_base 13: mod_base = OTHER; note = 2'-O-methylguanosine-3'-phosphate
  modified_base 14: mod_base = OTHER; note = 2'-O-methyluridine-3'-phosphate
  modified_base 15: mod_base = OTHER; note = 2'-O-methyladenosine-3'-phosphate
  modified_base 16: mod_base = OTHER; note = 2'-O-methylcytidine-3'-phosphate
  modified_base 17: mod_base = OTHER; note = 2'-O-methyladenosine-3'-phosphate
  modified_base 18: mod_base = OTHER; note = 2'-O-methyladenosine-3'-phosphate
  modified_base 19: mod_base = OTHER; note = 2'-O-methyluridine-3'-phosphorothioate
  modified_base 20: mod_base = OTHER; note = 2'-O-methylguanosine-3'-phosphorothioate
  modified_base 21: mod_base = OTHER; note = 2'-O-methyladenosine
tcagctgtgttcgtacaatga

SEQ ID NO: 4161 - RNA, 21 nt, synthetic construct
  source 1..21: mol_type = other RNA
  modified_base 1: mod_base = OTHER; note = 2'-O-methyluridine-3'-phosphorothioate
  modified_base 2: mod_base = OTHER; note = 2'-O-methyluridine-3'-phosphorothioate
  modified_base 3: mod_base = OTHER; note = 2'-O-methylguanosine-3'-phosphate
  modified_base 4: mod_base = OTHER; note = 2'-O-methylguanosine-3'-phosphate
  modified_base 5: mod_base = OTHER; note = 2'-O-methyluridine-3'-phosphate
  modified_base 6: mod_base = OTHER; note = 2'-O-hexadecyl-guanosine-3'-phosphate
  modified_base 7: mod_base = OTHER; note = 2'-deoxy-2'-fluorocytidine-3'-phosphate
  modified_base 8: mod_base = OTHER; note = 2'-O-methyladenosine-3'-phosphate
  modified_base 9: mod_base = OTHER; note = 2'-deoxy-2'-fluoroadenosine-3'-phosphate
  modified_base 10: mod_base = OTHER; note = 2'-deoxy-2'-fluorocytidine-3'-phosphate
  modified_base 11: mod_base = OTHER; note = 2'-deoxy-2'-fluorocytidine-3'-phosphate
  modified_base 12: mod_base = OTHER; note = 2'-O-methyluridine-3'-phosphate
  modified_base 13: mod_base = OTHER; note = 2'-O-methyluridine-3'-phosphate
  modified_base 14: mod_base = OTHER; note = 2'-O-methylcytidine-3'-phosphate
  modified_base 15: mod_base = OTHER; note = 2'-O-methylcytidine-3'-phosphate
  modified_base 16: mod_base = OTHER; note = 2'-O-methylcytidine-3'-phosphate
  modified_base 17: mod_base = OTHER; note = 2'-O-methyladenosine-3'-phosphate
  modified_base 18: mod_base = OTHER; note = 2'-O-methylguanosine-3'-phosphate
  modified_base 19: mod_base = OTHER; note = 2'-O-methylguanosine-3'-phosphorothioate
  modified_base 20: mod_base = OTHER; note = 2'-O-methylcytidine-3'-phosphorothioate
  modified_base 21: mod_base = OTHER; note = 2'-O-methyladenosine
ttggtgcaaccttcccaggca

SEQ ID NO: 4162 - RNA, 21 nt, synthetic construct
  source 1..21: mol_type = other RNA
  modified_base 1: mod_base = OTHER; note = 2'-O-methyluridine-3'-phosphorothioate
  modified_base 2: mod_base = OTHER; note = 2'-O-methylcytidine-3'-phosphorothioate
  modified_base 3: mod_base = OTHER; note = 2'-O-methylcytidine-3'-phosphate
  modified_base 4: mod_base = OTHER; note = 2'-O-methylcytidine-3'-phosphate
  modified_base 5: mod_base = OTHER; note = 2'-O-methyluridine-3'-phosphate
  modified_base 6: mod_base = OTHER; note = 2'-O-hexadecyl-guanosine-3'-phosphate
  modified_base 7: mod_base = OTHER; note = 2'-deoxy-2'-fluorocytidine-3'-phosphate
  modified_base 8: mod_base = OTHER; note = 2'-O-methylcytidine-3'-phosphate
  modified_base 9: mod_base = OTHER; note = 2'-deoxy-2'-fluoroadenosine-3'-phosphate
  modified_base 10: mod_base = OTHER; note = 2'-deoxy-2'-fluorocytidine-3'-phosphate
  modified_base 11: mod_base = OTHER; note = 2'-deoxy-2'-fluoroadenosine-3'-phosphate
  modified_base 12: mod_base = OTHER; note = 2'-O-methyluridine-3'-phosphate
  modified_base 13: mod_base = OTHER; note = 2'-O-methylguanosine-3'-phosphate
  modified_base 14: mod_base = OTHER; note = 2'-O-methyluridine-3'-phosphate
  modified_base 15: mod_base = OTHER; note = 2'-O-methylguanosine-3'-phosphate
  modified_base 16: mod_base = OTHER; note = 2'-O-methyluridine-3'-phosphate
  modified_base 17: mod_base = OTHER; note = 2'-O-methyladenosine-3'-phosphate
  modified_base 18: mod_base = OTHER; note = 2'-O-methylcytidine-3'-phosphate
  modified_base 19: mod_base = OTHER; note = 2'-O-methylcytidine-3'-phosphorothioate
  modified_base 20: mod_base = OTHER; note = 2'-O-methyluridine-3'-phosphorothioate
  modified_base 21: mod_base = OTHER; note = 2'-O-methyladenosine
tccctgccacatgtgtaccta

SEQ ID NO: 4163 - RNA, 21 nt, synthetic construct
  source 1..21: mol_type = other RNA
  modified_base 1: mod_base = OTHER; note = 2'-O-methyladenosine-3'-phosphorothioate
  modified_base 2: mod_base = OTHER; note = 2'-O-methylcytidine-3'-phosphorothioate
  modified_base 3: mod_base = OTHER; note = 2'-O-methylguanosine-3'-phosphate
  modified_base 4: mod_base = OTHER; note = 2'-O-methylguanosine-3'-phosphate
  modified_base 5: mod_base = OTHER; note = 2'-O-methyluridine-3'-phosphate
  modified_base 6: mod_base = OTHER; note = 2'-O-hexadecyl-guanosine-3'-phosphate
  modified_base 7: mod_base = OTHER; note = 2'-deoxy-2'-fluorocytidine-3'-phosphate
  modified_base 8: mod_base = OTHER; note = 2'-O-methyladenosine-3'-phosphate
  modified_base 9: mod_base = OTHER; note = 2'-deoxy-2'-fluoroadenosine-3'-phosphate
  modified_base 10: mod_base = OTHER; note = 2'-deoxy-2'-fluorouridine-3'-phosphate
  modified_base 11: mod_base = OTHER; note = 2'-deoxy-2'-fluoroguanosine-3'-phosphate
  modified_base 12: mod_base = OTHER; note = 2'-O-methyluridine-3'-phosphate
  modified_base 13: mod_base = OTHER; note = 2'-O-methylcytidine-3'-phosphate
  modified_base 14: mod_base = OTHER; note = 2'-O-methyladenosine-3'-phosphate
  modified_base 15: mod_base = OTHER; note = 2'-O-methylguanosine-3'-phosphate
  modified_base 16: mod_base = OTHER; note = 2'-O-methylguanosine-3'-phosphate
  modified_base 17: mod_base = OTHER; note = 2'-O-methyladenosine-3'-phosphate
  modified_base 18: mod_base = OTHER; note = 2'-O-methylguanosine-3'-phosphate
  modified_base 19: mod_base = OTHER; note = 2'-O-methylguanosine-3'-phosphorothioate
  modified_base 20: mod_base = OTHER; note = 2'-O-methyladenosine-3'-phosphorothioate
  modified_base 21: mod_base = OTHER; note = 2'-O-methyladenosine
acggtgcaatgtcaggaggaa

SEQ ID NO: 4164 - RNA, 21 nt, synthetic construct
  source 1..21: mol_type = other RNA
  modified_base 1: mod_base = OTHER; note = 2'-O-methylcytidine-3'-phosphorothioate
  modified_base 2: mod_base = OTHER; note = 2'-O-methyluridine-3'-phosphorothioate
  modified_base 3: mod_base = OTHER; note = 2'-O-methylguanosine-3'-phosphate
  modified_base 4: mod_base = OTHER; note = 2'-O-methylcytidine-3'-phosphate
  modified_base 5: mod_base = OTHER; note = 2'-O-methyladenosine-3'-phosphate
  modified_base 6: mod_base = OTHER; note = 2'-O-hexadecyl-adenosine-3'-phosphate
  modified_base 7: mod_base = OTHER; note = 2'-deoxy-2'-fluorocytidine-3'-phosphate
  modified_base 8: mod_base = OTHER; note = 2'-O-methyladenosine-3'-phosphate
  modified_base 9: mod_base = OTHER; note = 2'-deoxy-2'-fluoroadenosine-3'-phosphate
  modified_base 10: mod_base = OTHER; note = 2'-deoxy-2'-fluorouridine-3'-phosphate
  modified_base 11: mod_base = OTHER; note = 2'-deoxy-2'-fluoroadenosine-3'-phosphate
  modified_base 12: mod_base = OTHER; note = 2'-O-methylcytidine-3'-phosphate
  modified_base 13: mod_base = OTHER; note = 2'-O-methyluridine-3'-phosphate
  modified_base 14: mod_base = OTHER; note = 2'-O-methyladenosine-3'-phosphate
  modified_base 15: mod_base = OTHER; note = 2'-O-methylcytidine-3'-phosphate
  modified_base 16: mod_base = OTHER; note = 2'-O-methylcytidine-3'-phosphate
  modified_base 17: mod_base = OTHER; note = 2'-O-methyluridine-3'-phosphate
  modified_base 18: mod_base = OTHER; note = 2'-O-methylguanosine-3'-phosphate
  modified_base 19: mod_base = OTHER; note = 2'-O-methyluridine-3'-phosphorothioate
  modified_base 20: mod_base = OTHER; note = 2'-O-methylcytidine-3'-phosphorothioate
  modified_base 21: mod_base = OTHER; note = 2'-O-methyladenosine
ctgcaacaatactacctgtca

SEQ ID NO: 4165 - RNA, 21 nt, synthetic construct
  source 1..21: mol_type = other RNA
  modified_base 1: mod_base = OTHER; note = 2'-O-methylguanosine-3'-phosphorothioate
  modified_base 2: mod_base = OTHER; note = 2'-O-methylguanosine-3'-phosphorothioate
  modified_base 3: mod_base = OTHER; note = 2'-O-methylguanosine-3'-phosphate
  modified_base 4: mod_base = OTHER; note = 2'-O-methylcytidine-3'-phosphate
  modified_base 5: mod_base = OTHER; note = 2'-O-methyluridine-3'-phosphate
  modified_base 6: mod_base = OTHER; note = 2'-O-hexadecyl-uridine-3'-phosphate
  modified_base 7: mod_base = OTHER; note = 2'-deoxy-2'-fluorouridine-3'-phosphate
  modified_base 8: mod_base = OTHER; note = 2'-O-methylguanosine-3'-phosphate
  modified_base 9: mod_base = OTHER; note = 2'-deoxy-2'-fluoroadenosine-3'-phosphate
  modified_base 10: mod_base = OTHER; note = 2'-deoxy-2'-fluoroguanosine-3'-phosphate
  modified_base 11: mod_base = OTHER; note = 2'-deoxy-2'-fluorouridine-3'-phosphate
  modified_base 12: mod_base = OTHER; note = 2'-O-methyladenosine-3'-phosphate
  modified_base 13: mod_base = OTHER; note = 2'-O-methylcytidine-3'-phosphate
  modified_base 14: mod_base = OTHER; note = 2'-O-methyladenosine-3'-phosphate
  modified_base 15: mod_base = OTHER; note = 2'-O-methyladenosine-3'-phosphate
  modified_base 16: mod_base = OTHER; note = 2'-O-methylguanosine-3'-phosphate
  modified_base 17: mod_base = OTHER; note = 2'-O-methyladenosine-3'-phosphate
  modified_base 18: mod_base = OTHER; note = 2'-O-methylguanosine-3'-phosphate
  modified_base 19: mod_base = OTHER; note = 2'-O-methyladenosine-3'-phosphorothioate
  modified_base 20: mod_base = OTHER; note = 2'-O-methylguanosine-3'-phosphorothioate
  modified_base 21: mod_base = OTHER; note = 2'-O-methyladenosine
gggctttgagtacaagagaga

SEQ ID NO: 4166 - RNA, 21 nt, synthetic construct
  source 1..21: mol_type = other RNA
  modified_base 1: mod_base = OTHER; note = 2'-O-methylguanosine-3'-phosphorothioate
  modified_base 2: mod_base = OTHER; note = 2'-O-methyluridine-3'-phosphorothioate
  modified_base 3: mod_base = OTHER; note = 2'-O-methylcytidine-3'-phosphate
  modified_base 4: mod_base = OTHER; note = 2'-O-methylcytidine-3'-phosphate
  modified_base 5: mod_base = OTHER; note = 2'-O-methyladenosine-3'-phosphate
  modified_base 6: mod_base = OTHER; note = 2'-O-hexadecyl-guanosine-3'-phosphate
  modified_base 7: mod_base = OTHER; note = 2'-deoxy-2'-fluorocytidine-3'-phosphate
  modified_base 8: mod_base = OTHER; note = 2'-O-methyluridine-3'-phosphate
  modified_base 9: mod_base = OTHER; note = 2'-deoxy-2'-fluoroguanosine-3'-phosphate
  modified_base 10: mod_base = OTHER; note = 2'-deoxy-2'-fluoroadenosine-3'-phosphate
  modified_base 11: mod_base = OTHER; note = 2'-deoxy-2'-fluoroadenosine-3'-phosphate
  modified_base 12: mod_base = OTHER; note = 2'-O-methyluridine-3'-phosphate
  modified_base 13: mod_base = OTHER; note = 2'-O-methylguanosine-3'-phosphate
  modified_base 14: mod_base = OTHER; note = 2'-O-methyladenosine-3'-phosphate
  modified_base 15: mod_base = OTHER; note = 2'-O-methyladenosine-3'-phosphate
  modified_base 16: mod_base = OTHER; note = 2'-O-methyladenosine-3'-phosphate
  modified_base 17: mod_base = OTHER; note = 2'-O-methylcytidine-3'-phosphate
  modified_base 18: mod_base = OTHER; note = 2'-O-methylcytidine-3'-phosphate
  modified_base 19: mod_base = OTHER; note = 2'-O-methyluridine-3'-phosphorothioate
  modified_base 20: mod_base = OTHER; note = 2'-O-methylguanosine-3'-phosphorothioate
  modified_base 21: mod_base = OTHER; note = 2'-O-methyladenosine
gtccagctgaatgaaacctga

SEQ ID NO: 4167 - RNA, 21 nt, synthetic construct
  source 1..21: mol_type = other RNA
  modified_base 1: mod_base = OTHER; note = 2'-O-methylcytidine-3'-phosphorothioate
  modified_base 2: mod_base = OTHER; note = 2'-O-methyladenosine-3'-phosphorothioate
  modified_base 3: mod_base = OTHER; note = 2'-O-methyladenosine-3'-phosphate
  modified_base 4: mod_base = OTHER; note = 2'-O-methylcytidine-3'-phosphate
  modified_base 5: mod_base = OTHER; note = 2'-O-methyladenosine-3'-phosphate
  modified_base 6: mod_base = OTHER; note = 2'-O-hexadecyl-guanosine-3'-phosphate
  modified_base 7: mod_base = OTHER; note = 2'-deoxy-2'-fluorocytidine-3'-phosphate
  modified_base 8: mod_base = OTHER; note = 2'-O-methylcytidine-3'-phosphate
  modified_base 9: mod_base = OTHER; note = 2'-deoxy-2'-fluoroadenosine-3'-phosphate
  modified_base 10: mod_base = OTHER; note = 2'-deoxy-2'-fluorouridine-3'-phosphate
  modified_base 11: mod_base = OTHER; note = 2'-deoxy-2'-fluoroguanosine-3'-phosphate
  modified_base 12: mod_base = OTHER; note = 2'-O-methyluridine-3'-phosphate
  modified_base 13: mod_base = OTHER; note = 2'-O-methylguanosine-3'-phosphate
  modified_base 14: mod_base = OTHER; note = 2'-O-methylguanosine-3'-phosphate
  modified_base 15: mod_base = OTHER; note = 2'-O-methyladenosine-3'-phosphate
  modified_base 16: mod_base = OTHER; note = 2'-O-methylcytidine-3'-phosphate
  modified_base 17: mod_base = OTHER; note = 2'-O-methyladenosine-3'-phosphate
  modified_base 18: mod_base = OTHER; note = 2'-O-methyladenosine-3'-phosphate
  modified_base 19: mod_base = OTHER; note = 2'-O-methylcytidine-3'-phosphorothioate
  modified_base 20: mod_base = OTHER; note = 2'-O-methyluridine-3'-phosphorothioate
  modified_base 21: mod_base = OTHER; note = 2'-O-methyladenosine
caacagccatgtggacaacta

SEQ ID NO: 4168 - RNA, 21 nt, synthetic construct
  source 1..21: mol_type = other RNA
  modified_base 1: mod_base = OTHER; note = 2'-O-methylcytidine-3'-phosphorothioate
  modified_base 2: mod_base = OTHER; note = 2'-O-methylcytidine-3'-phosphorothioate
  modified_base 3: mod_base = OTHER; note = 2'-O-methylguanosine-3'-phosphate
  modified_base 4: mod_base = OTHER; note = 2'-O-methyluridine-3'-phosphate
  modified_base 5: mod_base = OTHER; note = 2'-O-methylguanosine-3'-phosphate
  modified_base 6: mod_base = OTHER; note = 2'-O-hexadecyl-uridine-3'-phosphate
  modified_base 7: mod_base = OTHER; note = 2'-deoxy-2'-fluoroadenosine-3'-phosphate
  modified_base 8: mod_base = OTHER; note = 2'-O-methylcytidine-3'-phosphate
  modified_base 9: mod_base = OTHER; note = 2'-deoxy-2'-fluorocytidine-3'-phosphate
  modified_base 10: mod_base = OTHER; note = 2'-deoxy-2'-fluorouridine-3'-phosphate
  modified_base 11: mod_base = OTHER; note = 2'-deoxy-2'-fluorocytidine-3'-phosphate
  modified_base 12: mod_base = OTHER; note = 2'-O-methyluridine-3'-phosphate
  modified_base 13: mod_base = OTHER; note = 2'-O-methylguanosine-3'-phosphate
  modified_base 14: mod_base = OTHER; note = 2'-O-methyluridine-3'-phosphate
  modified_base 15: mod_base = OTHER; note = 2'-O-methylguanosine-3'-phosphate
  modified_base 16: mod_base = OTHER; note = 2'-O-methyladenosine-3'-phosphate
  modified_base 17: mod_base = OTHER; note = 2'-O-methylguanosine-3'-phosphate
  modified_base 18: mod_base = OTHER; note = 2'-O-methylguanosine-3'-phosphate
  modified_base 19: mod_base = OTHER; note = 2'-O-methylcytidine-3'-phosphorothioate
  modified_base 20: mod_base = OTHER; note = 2'-O-methyluridine-3'-phosphorothioate
  modified_base 21: mod_base = OTHER; note = 2'-O-methyladenosine
ccgtgtacctctgtgaggcta

SEQ ID NO: 4169 - RNA, 21 nt, synthetic construct
  source 1..21: mol_type = other RNA
  modified_base 1: mod_base = OTHER; note = 2'-O-methylguanosine-3'-phosphorothioate
  modified_base 2: mod_base = OTHER; note = 2'-O-methylguanosine-3'-phosphorothioate
  modified_base 3: mod_base = OTHER; note = 2'-O-methyluridine-3'-phosphate
  modified_base 4: mod_base = OTHER; note = 2'-O-methylguanosine-3'-phosphate
  modified_base 5: mod_base = OTHER; note = 2'-O-methylguanosine-3'-phosphate
  modified_base 6: mod_base = OTHER; note = 2'-O-hexadecyl-adenosine-3'-phosphate
  modified_base 7: mod_base = OTHER; note = 2'-deoxy-2'-fluoroguanosine-3'-phosphate
  modified_base 8: mod_base = OTHER; note = 2'-O-methyluridine-3'-phosphate
  modified_base 9: mod_base = OTHER; note = 2'-deoxy-2'-fluorocytidine-3'-phosphate
  modified_base 10: mod_base = OTHER; note = 2'-deoxy-2'-fluorocytidine-3'-phosphate
  modified_base 11: mod_base = OTHER; note = 2'-deoxy-2'-fluoroadenosine-3'-phosphate
  modified_base 12: mod_base = OTHER; note = 2'-O-methyluridine-3'-phosphate
  modified_base 13: mod_base = OTHER; note = 2'-O-methyluridine-3'-phosphate
  modified_base 14: mod_base = OTHER; note = 2'-O-methyluridine-3'-phosphate
  modified_base 15: mod_base = OTHER; note = 2'-O-methylguanosine-3'-phosphate
  modified_base 16: mod_base = OTHER; note = 2'-O-methylcytidine-3'-phosphate
  modified_base 17: mod_base = OTHER; note = 2'-O-methyluridine-3'-phosphate
  modified_base 18: mod_base = OTHER; note = 2'-O-methylguanosine-3'-phosphate
  modified_base 19: mod_base = OTHER; note = 2'-O-methyladenosine-3'-phosphorothioate
  modified_base 20: mod_base = OTHER; note = 2'-O-methylcytidine-3'-phosphorothioate
  modified_base 21: mod_base = OTHER; note = 2'-O-methyladenosine
ggtggagtccatttgctgaca

SEQ ID NO: 4170 - RNA, 21 nt, synthetic construct
  source 1..21: mol_type = other RNA
  modified_base 1: mod_base = OTHER; note = 2'-O-methylcytidine-3'-phosphorothioate
  modified_base 2: mod_base = OTHER; note = 2'-O-methyluridine-3'-phosphorothioate
  modified_base 3: mod_base = OTHER; note = 2'-O-methylguanosine-3'-phosphate
  modified_base 4: mod_base = OTHER; note = 2'-O-methylcytidine-3'-phosphate
  modified_base 5: mod_base = OTHER; note = 2'-O-methylcytidine-3'-phosphate
  modified_base 6: mod_base = OTHER; note = 2'-O-hexadecyl-cytidine-3'-phosphate
  modified_base 7: mod_base = OTHER; note = 2'-deoxy-2'-fluoroadenosine-3'-phosphate
  modified_base 8: mod_base = OTHER; note = 2'-O-methylguanosine-3'-phosphate
  modified_base 9: mod_base = OTHER; note = 2'-deoxy-2'-fluoroadenosine-3'-phosphate
  modified_base 10: mod_base = OTHER; note = 2'-deoxy-2'-fluorouridine-3'-phosphate
  modified_base 11: mod_base = OTHER; note = 2'-deoxy-2'-fluoroguanosine-3'-phosphate
  modified_base 12: mod_base = OTHER; note = 2'-O-methyluridine-3'-phosphate
  modified_base 13: mod_base = OTHER; note = 2'-O-methylguanosine-3'-phosphate
  modified_base 14: mod_base = OTHER; note = 2'-O-methyluridine-3'-phosphate
  modified_base 15: mod_base = OTHER; note = 2'-O-methylcytidine-3'-phosphate
  modified_base 16: mod_base = OTHER; note = 2'-O-methylcytidine-3'-phosphate
  modified_base 17: mod_base = OTHER; note = 2'-O-methyladenosine-3'-phosphate
  modified_base 18: mod_base = OTHER; note = 2'-O-methylguanosine-3'-phosphate
  modified_base 19: mod_base = OTHER; note = 2'-O-methylcytidine-3'-phosphorothioate
  modified_base 20: mod_base = OTHER; note = 2'-O-methyluridine-3'-phosphorothioate
  modified_base 21: mod_base = OTHER; note = 2'-O-methyladenosine
ctgcccagatgtgtccagcta

SEQ ID NO: 4171 - RNA, 21 nt, synthetic construct
  source 1..21: mol_type = other RNA
  modified_base 1: mod_base = OTHER; note = 2'-O-methylguanosine-3'-phosphorothioate
  modified_base 2: mod_base = OTHER; note = 2'-O-methylcytidine-3'-phosphorothioate
  modified_base 3: mod_base = OTHER; note = 2'-O-methyluridine-3'-phosphate
  modified_base 4: mod_base = OTHER; note = 2'-O-methylguanosine-3'-phosphate
  modified_base 5: mod_base = OTHER; note = 2'-O-methylcytidine-3'-phosphate
  modified_base 6: mod_base = OTHER; note = 2'-O-hexadecyl-uridine-3'-phosphate
  modified_base 7: mod_base = OTHER; note = 2'-deoxy-2'-fluoroadenosine-3'-phosphate
  modified_base 8: mod_base = OTHER; note = 2'-O-methylcytidine-3'-phosphate
  modified_base 9: mod_base = OTHER; note = 2'-deoxy-2'-fluorouridine-3'-phosphate
  modified_base 10: mod_base = OTHER; note = 2'-deoxy-2'-fluorocytidine-3'-phosphate
  modified_base 11: mod_base = OTHER; note = 2'-deoxy-2'-fluorocytidine-3'-phosphate
  modified_base 12: mod_base = OTHER; note = 2'-O-methyluridine-3'-phosphate
  modified_base 13: mod_base = OTHER; note = 2'-O-methylguanosine-3'-phosphate
  modified_base 14: mod_base = OTHER; note = 2'-O-methyluridine-3'-phosphate
  modified_base 15: mod_base = OTHER; note = 2'-O-methylguanosine-3'-phosphate
  modified_base 16: mod_base = OTHER; note = 2'-O-methyladenosine-3'-phosphate
  modified_base 17: mod_base = OTHER; note = 2'-O-methylguanosine-3'-phosphate
  modified_base 18: mod_base = OTHER; note = 2'-O-methylguanosine-3'-phosphate
  modified_base 19: mod_base = OTHER; note = 2'-O-methyladenosine-3'-phosphorothioate
  modified_base 20: mod_base = OTHER; note = 2'-O-methylguanosine-3'-phosphorothioate
  modified_base 21: mod_base = OTHER; note = 2'-O-methyladenosine
gctgctactcctgtgaggaga

SEQ ID NO: 4172 - RNA, 21 nt, synthetic construct
  source 1..21: mol_type = other RNA
  modified_base 1: mod_base = OTHER; note = 2'-O-methyluridine-3'-phosphorothioate
  modified_base 2: mod_base = OTHER; note = 2'-O-methylcytidine-3'-phosphorothioate
  modified_base 3: mod_base = OTHER; note = 2'-O-methylcytidine-3'-phosphate
  modified_base 4: mod_base = OTHER; note = 2'-O-methyluridine-3'-phosphate
  modified_base 5: mod_base = OTHER; note = 2'-O-methylguanosine-3'-phosphate
  modified_base 6: mod_base = OTHER; note = 2'-O-hexadecyl-uridine-3'-phosphate
  modified_base 7: mod_base = OTHER; note = 2'-deoxy-2'-fluorocytidine-3'-phosphate
  modified_base 8: mod_base = OTHER; note = 2'-O-methyladenosine-3'-phosphate
  modified_base 9: mod_base = OTHER; note = 2'-deoxy-2'-fluoroadenosine-3'-phosphate
  modified_base 10: mod_base = OTHER; note = 2'-deoxy-2'-fluoroguanosine-3'-phosphate
  modified_base 11: mod_base = OTHER; note = 2'-deoxy-2'-fluorouridine-3'-phosphate
  modified_base 12: mod_base = OTHER; note = 2'-O-methylcytidine-3'-phosphate
  modified_base 13: mod_base = OTHER; note = 2'-O-methylcytidine-3'-phosphate
  modified_base 14: mod_base = OTHER; note = 2'-O-methylguanosine-3'-phosphate
  modified_base 15: mod_base = OTHER; note = 2'-O-methylcytidine-3'-phosphate
  modified_base 16: mod_base = OTHER; note = 2'-O-methyladenosine-3'-phosphate
  modified_base 17: mod_base = OTHER; note = 2'-O-methyluridine-3'-phosphate
  modified_base 18: mod_base = OTHER; note = 2'-O-methylcytidine-3'-phosphate
  modified_base 19: mod_base = OTHER; note = 2'-O-methyladenosine-3'-phosphorothioate
  modified_base 20: mod_base = OTHER; note = 2'-O-methyladenosine-3'-phosphorothioate
  modified_base 21: mod_base = OTHER; note = 2'-O-methyladenosine
tcctgtcaagtccgcatcaaa

SEQ ID NO: 4173 - RNA, 21 nt, synthetic construct
  source 1..21: mol_type = other RNA
  modified_base 1: mod_base = OTHER; note = 2'-O-methylguanosine-3'-phosphorothioate
  modified_base 2: mod_base = OTHER; note = 2'-O-methyladenosine-3'-phosphorothioate
  modified_base 3: mod_base = OTHER; note = 2'-O-methylcytidine-3'-phosphate
  modified_base 4: mod_base = OTHER; note = 2'-O-methylcytidine-3'-phosphate
  modified_base 5: mod_base = OTHER; note = 2'-O-methyladenosine-3'-phosphate
  modified_base 6: mod_base = OTHER; note = 2'-O-hexadecyl-uridine-3'-phosphate
  modified_base 7: mod_base = OTHER; note = 2'-deoxy-2'-fluorocytidine-3'-phosphate
  modified_base 8: mod_base = OTHER; note = 2'-O-methylcytidine-3'-phosphate
  modified_base 9: mod_base = OTHER; note = 2'-deoxy-2'-fluorouridine-3'-phosphate
  modified_base 10: mod_base = OTHER; note = 2'-deoxy-2'-fluoroguanosine-3'-phosphate
  modified_base 11: mod_base = OTHER; note = 2'-deoxy-2'-fluorouridine-3'-phosphate
  modified_base 12: mod_base = OTHER; note = 2'-O-methylguanosine-3'-phosphate
  modified_base 13: mod_base = OTHER; note = 2'-O-methylguanosine-3'-phosphate
  modified_base 14: mod_base = OTHER; note = 2'-O-methylcytidine-3'-phosphate
  modified_base 15: mod_base = OTHER; note = 2'-O-methyladenosine-3'-phosphate
  modified_base 16: mod_base = OTHER; note = 2'-O-methylcytidine-3'-phosphate
  modified_base 17: mod_base = OTHER; note = 2'-O-methylcytidine-3'-phosphate
  modified_base 18: mod_base = OTHER; note = 2'-O-methyladenosine-3'-phosphate
  modified_base 19: mod_base = OTHER; note = 2'-O-methylguanosine-3'-phosphorothioate
  modified_base 20: mod_base = OTHER; note = 2'-O-methylguanosine-3'-phosphorothioate
  modified_base 21: mod_base = OTHER; note = 2'-O-methyladenosine
gaccatcctgtggcaccagga

SEQ ID NO: 4174 - RNA, 21 nt, synthetic construct
  source 1..21: mol_type = other RNA
  modified_base 1: mod_base = OTHER; note = 2'-O-methylguanosine-3'-phosphorothioate
  modified_base 2: mod_base = OTHER; note = 2'-O-methylguanosine-3'-phosphorothioate
  modified_base 3: mod_base = OTHER; note = 2'-O-methyluridine-3'-phosphate
  modified_base 4: mod_base = OTHER; note = 2'-O-methylcytidine-3'-phosphate
  modified_base 5: mod_base = OTHER; note = 2'-O-methyladenosine-3'-phosphate
  modified_base 6: mod_base = OTHER; note = 2'-O-hexadecyl-adenosine-3'-phosphate
  modified_base 7: mod_base = OTHER; note = 2'-deoxy-2'-fluorocytidine-3'-phosphate
  modified_base 8: mod_base = OTHER; note = 2'-O-methyladenosine-3'-phosphate
  modified_base 9: mod_base = OTHER; note = 2'-deoxy-2'-fluorouridine-3'-phosphate
  modified_base 10: mod_base = OTHER; note = 2'-deoxy-2'-fluorocytidine-3'-phosphate
  modified_base 11: mod_base = OTHER; note = 2'-deoxy-2'-fluoroadenosine-3'-phosphate
  modified_base 12: mod_base = OTHER; note = 2'-O-methylcytidine-3'-phosphate
  modified_base 13: mod_base = OTHER; note = 2'-O-methylcytidine-3'-phosphate
  modified_base 14: mod_base = OTHER; note = 2'-O-methyluridine-3'-phosphate
  modified_base 15: mod_base = OTHER; note = 2'-O-methyluridine-3'-phosphate
  modified_base 16: mod_base = OTHER; note = 2'-O-methylcytidine-3'-phosphate
  modified_base 17: mod_base = OTHER; note = 2'-O-methyluridine-3'-phosphate
  modified_base 18: mod_base = OTHER; note = 2'-O-methylguanosine-3'-phosphate
  modified_base 19: mod_base = OTHER; note = 2'-O-methylcytidine-3'-phosphorothioate
  modified_base 20: mod_base = OTHER; note = 2'-O-methylguanosine-3'-phosphorothioate
  modified_base 21: mod_base = OTHER; note = 2'-O-methyladenosine
ggtcaacatcaccttctgcga

SEQ ID NO: 4175 - RNA, 21 nt, synthetic construct
  source 1..21: mol_type = other RNA
  modified_base 1: mod_base = OTHER; note = 2'-O-methylcytidine-3'-phosphorothioate
  modified_base 2: mod_base = OTHER; note = 2'-O-methylguanosine-3'-phosphorothioate
  modified_base 3: mod_base = OTHER; note = 2'-O-methyluridine-3'-phosphate
  modified_base 4: mod_base = OTHER; note = 2'-O-methylcytidine-3'-phosphate
  modified_base 5: mod_base = OTHER; note = 2'-O-methylcytidine-3'-phosphate
  modified_base 6: mod_base = OTHER; note = 2'-O-hexadecyl-adenosine-3'-phosphate
  modified_base 7: mod_base = OTHER; note = 2'-deoxy-2'-fluoroadenosine-3'-phosphate
  modified_base 8: mod_base = OTHER; note = 2'-O-methylguanosine-3'-phosphate
  modified_base 9: mod_base = OTHER; note = 2'-deoxy-2'-fluorouridine-3'-phosphate
  modified_base 10: mod_base = OTHER; note = 2'-deoxy-2'-fluoroadenosine-3'-phosphate
  modified_base 11: mod_base = OTHER; note = 2'-deoxy-2'-fluorocytidine-3'-phosphate
  modified_base 12: mod_base = OTHER; note = 2'-O-methyluridine-3'-phosphate
  modified_base 13: mod_base = OTHER; note = 2'-O-methylcytidine-3'-phosphate
  modified_base 14: mod_base = OTHER; note = 2'-O-methyladenosine-3'-phosphate
  modified_base 15: mod_base = OTHER; note = 2'-O-methylguanosine-3'-phosphate
  modified_base 16: mod_base = OTHER; note = 2'-O-methylcytidine-3'-phosphate
  modified_base 17: mod_base = OTHER; note = 2'-O-methyladenosine-3'-phosphate
  modified_base 18: mod_base = OTHER; note = 2'-O-methylguanosine-3'-phosphate
  modified_base 19: mod_base = OTHER; note = 2'-O-methyladenosine-3'-phosphorothioate
  modified_base 20: mod_base = OTHER; note = 2'-O-methylguanosine-3'-phosphorothioate
  modified_base 21: mod_base = OTHER; note = 2'-O-methyladenosine
cgtccaagtactcagcagaga

SEQ ID NO: 4176 - RNA, 21 nt, synthetic construct
  source 1..21: mol_type = other RNA
  modified_base 1: mod_base = OTHER; note = 2'-O-methyladenosine-3'-phosphorothioate
  modified_base 2: mod_base = OTHER; note = 2'-O-methyluridine-3'-phosphorothioate
  modified_base 3: mod_base = OTHER; note = 2'-O-methylguanosine-3'-phosphate
  modified_base 4: mod_base = OTHER; note = 2'-O-methylcytidine-3'-phosphate
  modified_base 5: mod_base = OTHER; note = 2'-O-methyladenosine-3'-phosphate
  modified_base 6: mod_base = OTHER; note = 2'-O-hexadecyl-guanosine-3'-phosphate
  modified_base 7: mod_base = OTHER; note = 2'-deoxy-2'-fluorocytidine-3'-phosphate
  modified_base 8: mod_base = OTHER; note = 2'-O-methyladenosine-3'-phosphate
  modified_base 9: mod_base = OTHER; note = 2'-deoxy-2'-fluorocytidine-3'-phosphate
  modified_base 10: mod_base = OTHER; note = 2'-deoxy-2'-fluorocytidine-3'-phosphate
  modified_base 11: mod_base = OTHER; note = 2'-deoxy-2'-fluoroadenosine-3'-phosphate
  modified_base 12: mod_base = OTHER; note = 2'-O-methylguanosine-3'-phosphate
  modified_base 13: mod_base = OTHER; note = 2'-O-methyluridine-3'-phosphate
  modified_base 14: mod_base = OTHER; note = 2'-O-methylguanosine-3'-phosphate
  modified_base 15: mod_base = OTHER; note = 2'-O-methylcytidine-3'-phosphate
  modified_base 16: mod_base = OTHER; note = 2'-O-methyladenosine-3'-phosphate
  modified_base 17: mod_base = OTHER; note = 2'-O-methylcytidine-3'-phosphate
  modified_base 18: mod_base = OTHER; note = 2'-O-methylcytidine-3'-phosphate
  modified_base 19: mod_base = OTHER; note = 2'-O-methyluridine-3'-phosphorothioate
  modified_base 20: mod_base = OTHER; note = 2'-O-methylguanosine-3'-phosphorothioate
  modified_base 21: mod_base = OTHER; note = 2'-O-methyladenosine
atgcagcaccagtgcacctga

SEQ ID NO: 4177 - RNA, 21 nt, synthetic construct
  source 1..21: mol_type = other RNA
  modified_base 1: mod_base = OTHER; note = 2'-O-methylguanosine-3'-phosphorothioate
  modified_base 2: mod_base = OTHER; note = 2'-O-methylcytidine-3'-phosphorothioate
  modified_base 3: mod_base = OTHER; note = 2'-O-methylcytidine-3'-phosphate
  modified_base 4: mod_base = OTHER; note = 2'-O-methylcytidine-3'-phosphate
  modified_base 5: mod_base = OTHER; note = 2'-O-methyluridine-3'-phosphate
  modified_base 6: mod_base = OTHER; note = 2'-O-hexadecyl-uridine-3'-phosphate
  modified_base 7: mod_base = OTHER; note = 2'-deoxy-2'-fluoroguanosine-3'-phosphate
  modified_base 8: mod_base = OTHER; note = 2'-O-methylcytidine-3'-phosphate
  modified_base 9: mod_base = OTHER; note = 2'-deoxy-2'-fluoroadenosine-3'-phosphate
  modified_base 10: mod_base = OTHER; note = 2'-deoxy-2'-fluorocytidine-3'-phosphate
  modified_base 11: mod_base = OTHER; note = 2'-deoxy-2'-fluorouridine-3'-phosphate
  modified_base 12: mod_base = OTHER; note = 2'-O-methylguanosine-3'-phosphate
  modified_base 13: mod_base = OTHER; note = 2'-O-methyluridine-3'-phosphate
  modified_base 14: mod_base = OTHER; note = 2'-O-methylcytidine-3'-phosphate
  modified_base 15: mod_base = OTHER; note = 2'-O-methylcytidine-3'-phosphate
  modified_base 16: mod_base = OTHER; note = 2'-O-methyluridine-3'-phosphate
  modified_base 17: mod_base = OTHER; note = 2'-O-methyladenosine-3'-phosphate
  modified_base 18: mod_base = OTHER; note = 2'-O-methyladenosine-3'-phosphate
  modified_base 19: mod_base = OTHER; note = 2'-O-methylcytidine-3'-phosphorothioate
  modified_base 20: mod_base = OTHER; note = 2'-O-methylguanosine-3'-phosphorothioate
  modified_base 21: mod_base = OTHER; note = 2'-O-methyladenosine
gcccttgcactgtcctaacga

SEQ ID NO: 4178 - RNA, 21 nt, synthetic construct
  source 1..21: mol_type = other RNA
  modified_base 1: mod_base = OTHER; note = 2'-O-methylcytidine-3'-phosphorothioate
  modified_base 2: mod_base = OTHER; note = 2'-O-methyluridine-3'-phosphorothioate
  modified_base 3: mod_base = OTHER; note = 2'-O-methylguanosine-3'-phosphate
  modified_base 4: mod_base = OTHER; note = 2'-O-methylcytidine-3'-phosphate
  modified_base 5: mod_base = OTHER; note = 2'-O-methyladenosine-3'-phosphate
  modified_base 6: mod_base = OTHER; note = 2'-O-hexadecyl-cytidine-3'-phosphate
  modified_base 7: mod_base = OTHER; note = 2'-deoxy-2'-fluoroadenosine-3'-phosphate
  modified_base 8: mod_base = OTHER; note = 2'-O-methylcytidine-3'-phosphate
  modified_base 9: mod_base = OTHER; note = 2'-deoxy-2'-fluorocytidine-3'-phosphate
  modified_base 10: mod_base = OTHER; note = 2'-deoxy-2'-fluorouridine-3'-phosphate
  modified_base 11: mod_base = OTHER; note = 2'-deoxy-2'-fluoroadenosine-3'-phosphate
  modified_base 12: mod_base = OTHER; note = 2'-O-methylcytidine-3'-phosphate
  modified_base 13: mod_base = OTHER; note = 2'-O-methyladenosine-3'-phosphate
  modified_base 14: mod_base = OTHER; note = 2'-O-methylcytidine-3'-phosphate
  modified_base 15: mod_base = OTHER; note = 2'-O-methylcytidine-3'-phosphate
  modified_base 16: mod_base = OTHER; note = 2'-O-methylcytidine-3'-phosphate
  modified_base 17: mod_base = OTHER; note = 2'-O-methyladenosine-3'-phosphate
  modified_base 18: mod_base = OTHER; note = 2'-O-methylcytidine-3'-phosphate
  modified_base 19: mod_base = OTHER; note = 2'-O-methylguanosine-3'-phosphorothioate
  modified_base 20: mod_base = OTHER; note = 2'-O-methyluridine-3'-phosphorothioate
  modified_base 21: mod_base = OTHER; note = 2'-O-methyladenosine
ctgcacacctacacccacgta

SEQ ID NO: 4179 - RNA, 21 nt, synthetic construct
  source 1..21: mol_type = other RNA
  modified_base 1: mod_base = OTHER; note = 2'-O-methylguanosine-3'-phosphorothioate
  modified_base 2: mod_base = OTHER; note = 2'-O-methylcytidine-3'-phosphorothioate
  modified_base 3: mod_base = OTHER; note = 2'-O-methyladenosine-3'-phosphate
  modified_base 4: mod_base = OTHER; note = 2'-O-methylcytidine-3'-phosphate
  modified_base 5: mod_base = OTHER; note = 2'-O-methylguanosine-3'-phosphate
  modified_base 6: mod_base = OTHER; note = 2'-O-hexadecyl-cytidine-3'-phosphate
  modified_base 7: mod_base = OTHER; note = 2'-deoxy-2'-fluorocytidine-3'-phosphate
  modified_base 8: mod_base = OTHER; note = 2'-O-methylcytidine-3'-phosphate
  modified_base 9: mod_base = OTHER; note = 2'-deoxy-2'-fluorouridine-3'-phosphate
  modified_base 10: mod_base = OTHER; note = 2'-deoxy-2'-fluorouridine-3'-phosphate
  modified_base 11: mod_base = OTHER; note = 2'-deoxy-2'-fluorocytidine-3'-phosphate
  modified_base 12: mod_base = OTHER; note = 2'-O-methyluridine-3'-phosphate
  modified_base 13: mod_base = OTHER; note = 2'-O-methylguanosine-3'-phosphate
  modified_base 14: mod_base = OTHER; note = 2'-O-methyluridine-3'-phosphate
  modified_base 15: mod_base = OTHER; note = 2'-O-methylguanosine-3'-phosphate
  modified_base 16: mod_base = OTHER; note = 2'-O-methyluridine-3'-phosphate
  modified_base 17: mod_base = OTHER; note = 2'-O-methylcytidine-3'-phosphate
  modified_base 18: mod_base = OTHER; note = 2'-O-methylcytidine-3'-phosphate
  modified_base 19: mod_base = OTHER; note = 2'-O-methylcytidine-3'-phosphorothioate
  modified_base 20: mod_base = OTHER; note = 2'-O-methyluridine-3'-phosphorothioate
  modified_base 21: mod_base = OTHER; note = 2'-O-methyladenosine
gcacgcccttctgtgtcccta

SEQ ID NO: 4180 - RNA, 21 nt, synthetic construct
  source 1..21: mol_type = other RNA
  modified_base 1: mod_base = OTHER; note = 2'-O-methyladenosine-3'-phosphorothioate
  modified_base 2: mod_base = OTHER; note = 2'-O-methylcytidine-3'-phosphorothioate
  modified_base 3: mod_base = OTHER; note = 2'-O-methyluridine-3'-phosphate
  modified_base 4: mod_base = OTHER; note = 2'-O-methylguanosine-3'-phosphate
  modified_base 5: mod_base = OTHER; note = 2'-O-methylcytidine-3'-phosphate
  modified_base 6: mod_base = OTHER; note = 2'-O-hexadecyl-uridine-3'-phosphate
  modified_base 7: mod_base = OTHER; note = 2'-deoxy-2'-fluoroguanosine-3'-phosphate
  modified_base 8: mod_base = OTHER; note = 2'-O-methyluridine-3'-phosphate
  modified_base 9: mod_base = OTHER; note = 2'-deoxy-2'-fluorocytidine-3'-phosphate
  modified_base 10: mod_base = OTHER; note = 2'-deoxy-2'-fluorouridine-3'-phosphate
  modified_base 11: mod_base = OTHER; note = 2'-deoxy-2'-fluoroguanosine-3'-phosphate
  modified_base 12: mod_base = OTHER; note = 2'-O-methyladenosine-3'-phosphate
  modified_base 13: mod_base = OTHER; note = 2'-O-methylguanosine-3'-phosphate
  modified_base 14: mod_base = OTHER; note = 2'-O-methyladenosine-3'-phosphate
  modified_base 15: mod_base = OTHER; note = 2'-O-methyladenosine-3'-phosphate
  modified_base 16: mod_base = OTHER; note = 2'-O-methylcytidine-3'-phosphate
  modified_base 17: mod_base = OTHER; note = 2'-O-methylguanosine-3'-phosphate
  modified_base 18: mod_base = OTHER; note = 2'-O-methyluridine-3'-phosphate
  modified_base 19: mod_base = OTHER; note = 2'-O-methyluridine-3'-phosphorothioate
  modified_base 20: mod_base = OTHER; note = 2'-O-methylcytidine-3'-phosphorothioate
  modified_base 21: mod_base = OTHER; note = 2'-O-methyladenosine
actgctgtctgagaacgttca

SEQ ID NO: 4181 - RNA, 21 nt, synthetic construct
  source 1..21: mol_type = other RNA
  modified_base 1: mod_base = OTHER; note = 2'-O-methylcytidine-3'-phosphorothioate
  modified_base 2: mod_base = OTHER; note = 2'-O-methyladenosine-3'-phosphorothioate
  modified_base 3: mod_base = OTHER; note = 2'-O-methyluridine-3'-phosphate
  modified_base 4: mod_base = OTHER; note = 2'-O-methylguanosine-3'-phosphate
  modified_base 5: mod_base = OTHER; note = 2'-O-methylcytidine-3'-phosphate
  modified_base 6: mod_base = OTHER; note = 2'-O-hexadecyl-uridine-3'-phosphate
  modified_base 7: mod_base = OTHER; note = 2'-deoxy-2'-fluorocytidine-3'-phosphate
  modified_base 8: mod_base = OTHER; note = 2'-O-methyluridine-3'-phosphate
  modified_base 9: mod_base = OTHER; note = 2'-deoxy-2'-fluoroguanosine-3'-phosphate
  modified_base 10: mod_base = OTHER; note = 2'-deoxy-2'-fluorouridine-3'-phosphate
  modified_base 11: mod_base = OTHER; note = 2'-deoxy-2'-fluorocytidine-3'-phosphate
  modified_base 12: mod_base = OTHER; note = 2'-O-methylcytidine-3'-phosphate
  modified_base 13: mod_base = OTHER; note = 2'-O-methyladenosine-3'-phosphate
  modified_base 14: mod_base = OTHER; note = 2'-O-methylcytidine-3'-phosphate
  modified_base 15: mod_base = OTHER; note = 2'-O-methylcytidine-3'-phosphate
  modified_base 16: mod_base = OTHER; note = 2'-O-methyluridine-3'-phosphate
  modified_base 17: mod_base = OTHER; note = 2'-O-methylguanosine-3'-phosphate
  modified_base 18: mod_base = OTHER; note = 2'-O-methylguanosine-3'-phosphate
  modified_base 19: mod_base = OTHER; note = 2'-O-methyladenosine-3'-phosphorothioate
  modified_base 20: mod_base = OTHER; note = 2'-O-methylguanosine-3'-phosphorothioate
  modified_base 21: mod_base = OTHER; note = 2'-O-methyladenosine
catgctctgtccacctggaga

SEQ ID NO: 4182 - RNA, 21 nt, synthetic construct
  source 1..21: mol_type = other RNA
  modified_base 1: mod_base = OTHER; note = 2'-O-methylguanosine-3'-phosphorothioate
  modified_base 2: mod_base = OTHER; note = 2'-O-methylcytidine-3'-phosphorothioate
  modified_base 3: mod_base = OTHER; note = 2'-O-methyladenosine-3'-phosphate
  modified_base 4: mod_base = OTHER; note = 2'-O-methyluridine-3'-phosphate
  modified_base 5: mod_base = OTHER; note = 2'-O-methyluridine-3'-phosphate
  modified_base 6: mod_base = OTHER; note = 2'-O-hexadecyl-guanosine-3'-phosphate
  modified_base 7: mod_base = OTHER; note = 2'-deoxy-2'-fluorouridine-3'-phosphate
  modified_base 8: mod_base = OTHER; note = 2'-O-methylcytidine-3'-phosphate
  modified_base 9: mod_base = OTHER; note = 2'-deoxy-2'-fluorouridine-3'-phosphate
  modified_base 10: mod_base = OTHER; note = 2'-deoxy-2'-fluoroguanosine-3'-phosphate
  modified_base 11: mod_base = OTHER; note = 2'-deoxy-2'-fluoroadenosine-3'-phosphate
  modified_base 12: mod_base = OTHER; note = 2'-O-methyluridine-3'-phosphate
  modified_base 13: mod_base = OTHER; note = 2'-O-methylcytidine-3'-phosphate
  modified_base 14: mod_base = OTHER; note = 2'-O-methyladenosine-3'-phosphate
  modified_base 15: mod_base = OTHER; note = 2'-O-methyluridine-3'-phosphate
  modified_base 16: mod_base = OTHER; note = 2'-O-methylguanosine-3'-phosphate
  modified_base 17: mod_base = OTHER; note = 2'-O-methyladenosine-3'-phosphate
  modified_base 18: mod_base = OTHER; note = 2'-O-methyladenosine-3'-phosphate
  modified_base 19: mod_base = OTHER; note = 2'-O-methyladenosine-3'-phosphorothioate
  modified_base 20: mod_base = OTHER; note = 2'-O-methyladenosine-3'-phosphorothioate
  modified_base 21: mod_base = OTHER; note = 2'-O-methyladenosine
gcattgtctgatcatgaaaaa

SEQ ID NO: 4183 - RNA, 21 nt, synthetic construct
  source 1..21: mol_type = other RNA
  modified_base 1: mod_base = OTHER; note = 2'-O-methylguanosine-3'-phosphorothioate
  modified_base 2: mod_base = OTHER; note = 2'-O-methylguanosine-3'-phosphorothioate
  modified_base 3: mod_base = OTHER; note = 2'-O-methylcytidine-3'-phosphate
  modified_base 4: mod_base = OTHER; note = 2'-O-methylguanosine-3'-phosphate
  modified_base 5: mod_base = OTHER; note = 2'-O-methylcytidine-3'-phosphate
  modified_base 6: mod_base = OTHER; note = 2'-O-hexadecyl-cytidine-3'-phosphate
  modified_base 7: mod_base = OTHER; note = 2'-deoxy-2'-fluoroadenosine-3'-phosphate
  modified_base 8: mod_base = OTHER; note = 2'-O-methylcytidine-3'-phosphate
  modified_base 9: mod_base = OTHER; note = 2'-deoxy-2'-fluorouridine-3'-phosphate
  modified_base 10: mod_base = OTHER; note = 2'-deoxy-2'-fluorocytidine-3'-phosphate
  modified_base 11: mod_base = OTHER; note = 2'-deoxy-2'-fluoroadenosine-3'-phosphate
  modified_base 12: mod_base = OTHER; note = 2'-O-methylguanosine-3'-phosphate
  modified_base 13: mod_base = OTHER; note = 2'-O-methylguanosine-3'-phosphate
  modified_base 14: mod_base = OTHER; note = 2'-O-methyladenosine-3'-phosphate
  modified_base 15: mod_base = OTHER; note = 2'-O-methylguanosine-3'-phosphate
  modified_base 16: mod_base = OTHER; note = 2'-O-methyluridine-3'-phosphate
  modified_base 17: mod_base = OTHER; note = 2'-O-methylcytidine-3'-phosphate
  modified_base 18: mod_base = OTHER; note = 2'-O-methylcytidine-3'-phosphate
  modified_base 19: mod_base = OTHER; note = 2'-O-methyluridine-3'-phosphorothioate
  modified_base 20: mod_base = OTHER; note = 2'-O-methyladenosine-3'-phosphorothioate
  modified_base 21: mod_base = OTHER; note = 2'-O-methyladenosine
ggcgccactcaggagtcctaa

SEQ ID NO: 4184 - RNA, 21 nt, synthetic construct
  source 1..21: mol_type = other RNA
  modified_base 1: mod_base = OTHER; note = 2'-O-methylcytidine-3'-phosphorothioate
  modified_base 2: mod_base = OTHER; note = 2'-O-methyluridine-3'-phosphorothioate
  modified_base 3: mod_base = OTHER; note = 2'-O-methylcytidine-3'-phosphate
  modified_base 4: mod_base = OTHER; note = 2'-O-methylcytidine-3'-phosphate
  modified_base 5: mod_base = OTHER; note = 2'-O-methylcytidine-3'-phosphate
  modified_base 6: mod_base = OTHER; note = 2'-O-hexadecyl-uridine-3'-phosphate
  modified_base 7: mod_base = OTHER; note = 2'-deoxy-2'-fluoroguanosine-3'-phosphate
  modified_base 8: mod_base = OTHER; note = 2'-O-methyladenosine-3'-phosphate
  modified_base 9: mod_base = OTHER; note = 2'-deoxy-2'-fluorouridine-3'-phosphate
  modified_base 10: mod_base = OTHER; note = 2'-deoxy-2'-fluoroguanosine-3'-phosphate
  modified_base 11: mod_base = OTHER; note = 2'-deoxy-2'-fluorouridine-3'-phosphate
  modified_base 12: mod_base = OTHER; note = 2'-O-methylcytidine-3'-phosphate
  modified_base 13: mod_base = OTHER; note = 2'-O-methyladenosine-3'-phosphate
  modified_base 14: mod_base = OTHER; note = 2'-O-methylcytidine-3'-phosphate
  modified_base 15: mod_base = OTHER; note = 2'-O-methyluridine-3'-phosphate
  modified_base 16: mod_base = OTHER; note = 2'-O-methylguanosine-3'-phosphate
  modified_base 17: mod_base = OTHER; note = 2'-O-methylguanosine-3'-phosphate
  modified_base 18: mod_base = OTHER; note = 2'-O-methylguanosine-3'-phosphate
  modified_base 19: mod_base = OTHER; note = 2'-O-methyladenosine-3'-phosphorothioate
  modified_base 20: mod_base = OTHER; note = 2'-O-methylcytidine-3'-phosphorothioate
  modified_base 21: mod_base = OTHER; note = 2'-O-methyladenosine
ctccctgatgtcactgggaca

SEQ ID NO: 4185 - RNA, 21 nt, synthetic construct
  source 1..21: mol_type = other RNA
  modified_base 1: mod_base = OTHER; note = 2'-O-methylcytidine-3'-phosphorothioate
  modified_base 2: mod_base = OTHER; note = 2'-O-methyluridine-3'-phosphorothioate
  modified_base 3: mod_base = OTHER; note = 2'-O-methylguanosine-3'-phosphate
  modified_base 4: mod_base = OTHER; note = 2'-O-methylguanosine-3'-phosphate
  modified_base 5: mod_base = OTHER; note = 2'-O-methyladenosine-3'-phosphate
  modified_base 6: mod_base = OTHER; note = 2'-O-hexadecyl-adenosine-3'-phosphate
  modified_base 7: mod_base = OTHER; note = 2'-deoxy-2'-fluorocytidine-3'-phosphate
  modified_base 8: mod_base = OTHER; note = 2'-O-methyladenosine-3'-phosphate
  modified_base 9: mod_base = OTHER; note = 2'-deoxy-2'-fluoroadenosine-3'-phosphate
  modified_base 10: mod_base = OTHER; note = 2'-deoxy-2'-fluoroadenosine-3'-phosphate
  modified_base 11: mod_base = OTHER; note = 2'-deoxy-2'-fluorocytidine-3'-phosphate
  modified_base 12: mod_base = OTHER; note = 2'-O-methyluridine-3'-phosphate
  modified_base 13: mod_base = OTHER; note = 2'-O-methyladenosine-3'-phosphate
  modified_base 14: mod_base = OTHER; note = 2'-O-methyladenosine-3'-phosphate
  modified_base 15: mod_base = OTHER; note = 2'-O-methylguanosine-3'-phosphate
  modified_base 16: mod_base = OTHER; note = 2'-O-methylcytidine-3'-phosphate
  modified_base 17: mod_base = OTHER; note = 2'-O-methyladenosine-3'-phosphate
  modified_base 18: mod_base = OTHER; note = 2'-O-methyluridine-3'-phosphate
  modified_base 19: mod_base = OTHER; note = 2'-O-methylguanosine-3'-phosphorothioate
  modified_base 20: mod_base = OTHER; note = 2'-O-methyluridine-3'-phosphorothioate
  modified_base 21: mod_base = OTHER; note = 2'-O-methyladenosine
ctggaacaaactaagcatgta

SEQ ID NO: 4186 - RNA, 21 nt, synthetic construct
  source 1..21: mol_type = other RNA
  modified_base 1: mod_base = OTHER; note = 2'-O-methylguanosine-3'-phosphorothioate
  modified_base 2: mod_base = OTHER; note = 2'-O-methylcytidine-3'-phosphorothioate
  modified_base 3: mod_base = OTHER; note = 2'-O-methyladenosine-3'-phosphate
  modified_base 4: mod_base = OTHER; note = 2'-O-methylcytidine-3'-phosphate
  modified_base 5: mod_base = OTHER; note = 2'-O-methylguanosine-3'-phosphate
  modified_base 6: mod_base = OTHER; note = 2'-O-hexadecyl-guanosine-3'-phosphate
  modified_base 7: mod_base = OTHER; note = 2'-deoxy-2'-fluoroadenosine-3'-phosphate
  modified_base 8: mod_base = OTHER; note = 2'-O-methyluridine-3'-phosphate
  modified_base 9: mod_base = OTHER; note = 2'-deoxy-2'-fluorouridine-3'-phosphate
  modified_base 10: mod_base = OTHER; note = 2'-deoxy-2'-fluorocytidine-3'-phosphate
  modified_base 11: mod_base = OTHER; note = 2'-deoxy-2'-fluorocytidine-3'-phosphate
  modified_base 12: mod_base = OTHER; note = 2'-O-methyladenosine-3'-phosphate
  modified_base 13: mod_base = OTHER; note = 2'-O-methylguanosine-3'-phosphate
  modified_base 14: mod_base = OTHER; note = 2'-O-methylcytidine-3'-phosphate
  modified_base 15: mod_base = OTHER; note = 2'-O-methyluridine-3'-phosphate
  modified_base 16: mod_base = OTHER; note = 2'-O-methylguanosine-3'-phosphate
  modified_base 17: mod_base = OTHER; note = 2'-O-methylguanosine-3'-phosphate
  modified_base 18: mod_base = OTHER; note = 2'-O-methylcytidine-3'-phosphate
  modified_base 19: mod_base = OTHER; note = 2'-O-methylcytidine-3'-phosphorothioate
  modified_base 20: mod_base = OTHER; note = 2'-O-methyladenosine-3'-phosphorothioate
  modified_base 21: mod_base = OTHER; note = 2'-O-methyladenosine
gcacggattccagctggccaa

SEQ ID NO: 4187 - RNA, 21 nt, synthetic construct
  source 1..21: mol_type = other RNA
  modified_base 1: mod_base = OTHER; note = 2'-O-methylguanosine-3'-phosphorothioate
  modified_base 2: mod_base = OTHER; note = 2'-O-methyladenosine-3'-phosphorothioate
  modified_base 3: mod_base = OTHER; note = 2'-O-methylcytidine-3'-phosphate
  modified_base 4: mod_base = OTHER; note = 2'-O-methyladenosine-3'-phosphate
  modified_base 5: mod_base = OTHER; note = 2'-O-methylguanosine-3'-phosphate
  modified_base 6: mod_base = OTHER; note = 2'-O-hexadecyl-guanosine-3'-phosphate
  modified_base 7: mod_base = OTHER; note = 2'-deoxy-2'-fluorocytidine-3'-phosphate
  modified_base 8: mod_base = OTHER; note = 2'-O-methyluridine-3'-phosphate
  modified_base 9: mod_base = OTHER; note = 2'-deoxy-2'-fluoroguanosine-3'-phosphate
  modified_base 10: mod_base = OTHER; note = 2'-deoxy-2'-fluoroguanosine-3'-phosphate
  modified_base 11: mod_base = OTHER; note = 2'-deoxy-2'-fluorouridine-3'-phosphate
  modified_base 12: mod_base = OTHER; note = 2'-O-methylcytidine-3'-phosphate
  modified_base 13: mod_base = OTHER; note = 2'-O-methylcytidine-3'-phosphate
  modified_base 14: mod_base = OTHER; note = 2'-O-methyladenosine-3'-phosphate
  modified_base 15: mod_base = OTHER; note = 2'-O-methylguanosine-3'-phosphate
  modified_base 16: mod_base = OTHER; note = 2'-O-methylguanosine-3'-phosphate
  modified_base 17: mod_base = OTHER; note = 2'-O-methylcytidine-3'-phosphate
  modified_base 18: mod_base = OTHER; note = 2'-O-methyladenosine-3'-phosphate
  modified_base 19: mod_base = OTHER; note = 2'-O-methyladenosine-3'-phosphorothioate
  modified_base 20: mod_base = OTHER; note = 2'-O-methylguanosine-3'-phosphorothioate
  modified_base 21: mod_base = OTHER; note = 2'-O-methyladenosine
gacaggctggtccaggcaaga

SEQ ID NO: 4188 - RNA, 21 nt, synthetic construct
  source 1..21: mol_type = other RNA
  modified_base 1: mod_base = OTHER; note = 2'-O-methylguanosine-3'-phosphorothioate
  modified_base 2: mod_base = OTHER; note = 2'-O-methylcytidine-3'-phosphorothioate
  modified_base 3: mod_base = OTHER; note = 2'-O-methyluridine-3'-phosphate
  modified_base 4: mod_base = OTHER; note = 2'-O-methylguanosine-3'-phosphate
  modified_base 5: mod_base = OTHER; note = 2'-O-methylcytidine-3'-phosphate
  modified_base 6: mod_base = OTHER; note = 2'-O-hexadecyl-cytidine-3'-phosphate
  modified_base 7: mod_base = OTHER; note = 2'-deoxy-2'-fluoroadenosine-3'-phosphate
  modified_base 8: mod_base = OTHER; note = 2'-O-methylguanosine-3'-phosphate
  modified_base 9: mod_base = OTHER; note = 2'-deoxy-2'-fluoroguanosine-3'-phosphate
  modified_base 10: mod_base = OTHER; note = 2'-deoxy-2'-fluoroadenosine-3'-phosphate
  modified_base 11: mod_base = OTHER; note = 2'-deoxy-2'-fluoroadenosine-3'-phosphate
  modified_base 12: mod_base = OTHER; note = 2'-O-methylguanosine-3'-phosphate
  modified_base 13: mod_base = OTHER; note = 2'-O-methylcytidine-3'-phosphate
  modified_base 14: mod_base = OTHER; note = 2'-O-methyluridine-3'-phosphate
  modified_base 15: mod_base = OTHER; note = 2'-O-methylguanosine-3'-phosphate
  modified_base 16: mod_base = OTHER; note = 2'-O-methylcytidine-3'-phosphate
  modified_base 17: mod_base = OTHER; note = 2'-O-methylguanosine-3'-phosphate
  modified_base 18: mod_base = OTHER; note = 2'-O-methyladenosine-3'-phosphate
  modified_base 19: mod_base = OTHER; note = 2'-O-methylcytidine-3'-phosphorothioate
  modified_base 20: mod_base = OTHER; note = 2'-O-methyladenosine-3'-phosphorothioate
  modified_base 21: mod_base = OTHER; note = 2'-O-methyladenosine
gctgccaggaagctgcgacaa

SEQ ID NO: 4189 - RNA, 21 nt, synthetic construct
  source 1..21: mol_type = other RNA
  modified_base 1: mod_base = OTHER; note = 2'-O-methylguanosine-3'-phosphorothioate
  modified_base 2: mod_base = OTHER; note = 2'-O-methylcytidine-3'-phosphorothioate
  modified_base 3: mod_base = OTHER; note = 2'-O-methyladenosine-3'-phosphate
  modified_base 4: mod_base = OTHER; note = 2'-O-methylguanosine-3'-phosphate
  modified_base 5: mod_base = OTHER; note = 2'-O-methylguanosine-3'-phosphate
  modified_base 6: mod_base = OTHER; note = 2'-O-hexadecyl-guanosine-3'-phosphate
  modified_base 7: mod_base = OTHER; note = 2'-deoxy-2'-fluorouridine-3'-phosphate
  modified_base 8: mod_base = OTHER; note = 2'-O-methyladenosine-3'-phosphate
  modified_base 9: mod_base = OTHER; note = 2'-deoxy-2'-fluoroadenosine-3'-phosphate
  modified_base 10: mod_base = OTHER; note = 2'-deoxy-2'-fluorocytidine-3'-phosphate
  modified_base 11: mod_base = OTHER; note = 2'-deoxy-2'-fluorouridine-3'-phosphate
  modified_base 12: mod_base = OTHER; note = 2'-O-methylcytidine-3'-phosphate
  modified_base 13: mod_base = OTHER; note = 2'-O-methyladenosine-3'-phosphate
  modified_base 14: mod_base = OTHER; note = 2'-O-methylguanosine-3'-phosphate
  modified_base 15: mod_base = OTHER; note = 2'-O-methylguanosine-3'-phosphate
  modified_base 16: mod_base = OTHER; note = 2'-O-methylguanosine-3'-phosphate
  modified_base 17: mod_base = OTHER; note = 2'-O-methylcytidine-3'-phosphate
  modified_base 18: mod_base = OTHER; note = 2'-O-methyluridine-3'-phosphate
  modified_base 19: mod_base = OTHER; note = 2'-O-methylguanosine-3'-phosphorothioate
  modified_base 20: mod_base = OTHER; note = 2'-O-methyladenosine-3'-phosphorothioate
  modified_base 21: mod_base = OTHER; note = 2'-O-methyladenosine
gcagggtaactcagggctgaa

SEQ ID NO: 4190 - RNA, 21 nt, synthetic construct
  source 1..21: mol_type = other RNA
  modified_base 1: mod_base = OTHER; note = 2'-O-methylguanosine-3'-phosphorothioate
  modified_base 2: mod_base = OTHER; note = 2'-O-methylcytidine-3'-phosphorothioate
  modified_base 3: mod_base = OTHER; note = 2'-O-methyladenosine-3'-phosphate
  modified_base 4: mod_base = OTHER; note = 2'-O-methyladenosine-3'-phosphate
  modified_base 5: mod_base = OTHER; note = 2'-O-methylcytidine-3'-phosphate
  modified_base 6: mod_base = OTHER; note = 2'-O-hexadecyl-guanosine-3'-phosphate
  modified_base 7: mod_base = OTHER; note = 2'-deoxy-2'-fluoroguanosine-3'-phosphate
  modified_base 8: mod_base = OTHER; note = 2'-O-methylcytidine-3'-phosphate
  modified_base 9: mod_base = OTHER; note = 2'-deoxy-2'-fluorocytidine-3'-phosphate
  modified_base 10: mod_base = OTHER; note = 2'-deoxy-2'-fluoroadenosine-3'-phosphate
  modified_base 11: mod_base = OTHER; note = 2'-deoxy-2'-fluoroguanosine-3'-phosphate
  modified_base 12: mod_base = OTHER; note = 2'-O-methylguanosine-3'-phosphate
  modified_base 13: mod_base = OTHER; note = 2'-O-methyluridine-3'-phosphate
  modified_base 14: mod_base = OTHER; note = 2'-O-methylcytidine-3'-phosphate
  modified_base 15: mod_base = OTHER; note = 2'-O-methyladenosine-3'-phosphate
  modified_base 16: mod_base = OTHER; note = 2'-O-methylguanosine-3'-phosphate
  modified_base 17: mod_base = OTHER; note = 2'-O-methyladenosine-3'-phosphate
  modified_base 18: mod_base = OTHER; note = 2'-O-methylguanosine-3'-phosphate
  modified_base 19: mod_base = OTHER; note = 2'-O-methyladenosine-3'-phosphorothioate
  modified_base 20: mod_base = OTHER; note = 2'-O-methylguanosine-3'-phosphorothioate
  modified_base 21: mod_base = OTHER; note = 2'-O-methyladenosine
gcaacggccaggtcagagaga

SEQ ID NO: 4191 - RNA, 21 nt, synthetic construct
  source 1..21: mol_type = other RNA
  modified_base 1: mod_base = OTHER; note = 2'-O-methyladenosine-3'-phosphorothioate
  modified_base 2: mod_base = OTHER; note = 2'-O-methylguanosine-3'-phosphorothioate
  modified_base 3: mod_base = OTHER; note = 2'-O-methylcytidine-3'-phosphate
  modified_base 4: mod_base = OTHER; note = 2'-O-methylcytidine-3'-phosphate
  modified_base 5: mod_base = OTHER; note = 2'-O-methylcytidine-3'-phosphate
  modified_base 6: mod_base = OTHER; note = 2'-O-hexadecyl-adenosine-3'-phosphate
  modified_base 7: mod_base = OTHER; note = 2'-deoxy-2'-fluoroguanosine-3'-phosphate
  modified_base 8: mod_base = OTHER; note = 2'-O-methyluridine-3'-phosphate
  modified_base 9: mod_base = OTHER; note = 2'-deoxy-2'-fluorouridine-3'-phosphate
  modified_base 10: mod_base = OTHER; note = 2'-deoxy-2'-fluorouridine-3'-phosphate
  modified_base 11: mod_base = OTHER; note = 2'-deoxy-2'-fluorouridine-3'-phosphate
  modified_base 12: mod_base = OTHER; note = 2'-O-methylguanosine-3'-phosphate
  modified_base 13: mod_base = OTHER; note = 2'-O-methylcytidine-3'-phosphate
  modified_base 14: mod_base = OTHER; note = 2'-O-methyladenosine-3'-phosphate
  modified_base 15: mod_base = OTHER; note = 2'-O-methyladenosine-3'-phosphate
  modified_base 16: mod_base = OTHER; note = 2'-O-methyladenosine-3'-phosphate
  modified_base 17: mod_base = OTHER; note = 2'-O-methyluridine-3'-phosphate
  modified_base 18: mod_base = OTHER; note = 2'-O-methyladenosine-3'-phosphate
  modified_base 19: mod_base = OTHER; note = 2'-O-methyladenosine-3'-phosphorothioate
  modified_base 20: mod_base = OTHER; note = 2'-O-methyladenosine-3'-phosphorothioate
  modified_base 21: mod_base = OTHER; note = 2'-O-methyladenosine
agcccagttttgcaaataaaa

SEQ ID NO: 4192 - RNA, 21 nt, synthetic construct
  source 1..21: mol_type = other RNA
ccagctgtcagtgagttctaa

SEQ ID NO: 4193 - RNA, 21 nt, synthetic construct
  source 1..21: mol_type = other RNA
tgaactccatctttacgcaga

SEQ ID NO: 4194 - RNA, 21 nt, synthetic construct
  source 1..21: mol_type = other RNA
atccttcttcatcatagtaca

SEQ ID NO: 4195 - RNA, 21 nt, synthetic construct
  source 1..21: mol_type = other RNA
ggttgactctacaaaatacta

SEQ ID NO: 4196 - RNA, 21 nt, synthetic construct
  source 1..21: mol_type = other RNA
tgactctacaaaatactatga

SEQ ID NO: 4197 - RNA, 21 nt, synthetic construct
  source 1..21: mol_type = other RNA
actctacaaaatactatgaaa

SEQ ID NO: 4198 - RNA, 21 nt, synthetic construct
  source 1..21: mol_type = other RNA
ctctacaaaatactatgaaga

SEQ ID NO: 4199 - RNA, 21 nt, synthetic construct
  source 1..21: mol_type = other RNA
tcacttcaacttctatgtcga

SEQ ID NO: 4200 - RNA, 21 nt, synthetic construct
  source 1..21: mol_type = other RNA
agtctctctacctttccagca

SEQ ID NO: 4201 - RNA, 21 nt, synthetic construct
  source 1..21: mol_type = other RNA
ggtctcaacgacagaaactga

SEQ ID NO: 4202 - RNA, 21 nt, synthetic construct
  source 1..21: mol_type = other RNA
cctcttcccaacactagtcta

SEQ ID NO: 4203 - RNA, 21 nt, synthetic construct
  source 1..21: mol_type = other RNA
gtgctttaactacaatataca

SEQ ID NO: 4204 - RNA, 21 nt, synthetic construct
  source 1..21: mol_type = other RNA
tccacctttcagactaaccga

SEQ ID NO: 4205 - RNA, 21 nt, synthetic construct
  source 1..21: mol_type = other RNA
ccacctttcagactaaccgta

SEQ ID NO: 4206 - RNA, 21 nt, synthetic construct
  source 1..21: mol_type = other RNA
cacctttcagactaaccgtca

SEQ ID NO: 4207 - RNA, 21 nt, synthetic construct
  source 1..21: mol_type = other RNA
ggatatcatctacaataagaa

SEQ ID NO: 4208 - RNA, 21 nt, synthetic construct
  source 1..21: mol_type = other RNA
ctctaccactgtacctttgca

SEQ ID NO: 4209 - RNA, 21 nt, synthetic construct
  source 1..21: mol_type = other RNA
ctaccactgtacctttgccta

SEQ ID NO: 4210 - RNA, 21 nt, synthetic construct
  source 1..21: mol_type = other RNA
ggcaacaatcaaatcattcta

SEQ ID NO: 4211 - RNA, 21 nt, synthetic construct
  source 1..21: mol_type = other RNA
tgccacttccactacgagtga

SEQ ID NO: 4212 - RNA, 21 nt, synthetic construct
  source 1..21: mol_type = other RNA
cacttccactacgagtgtgaa

SEQ ID NO: 4213 - RNA, 21 nt, synthetic construct
  source 1..21: mol_type = other RNA
ccagatgccttcttcagaaga

SEQ ID NO: 4214 - RNA, 23 nt, synthetic construct
  source 1..23: mol_type = other RNA
ttagaactcactgacagctggga

SEQ ID NO: 4215 - RNA, 23 nt, synthetic construct
  source 1..23: mol_type = other RNA
tctgcgtaaagatggagttcagg

SEQ ID NO: 4216 - RNA, 23 nt, synthetic construct
  source 1..23: mol_type = other RNA
tgtactatgatgaagaaggatga

SEQ ID NO: 4217 - RNA, 23 nt, synthetic construct
  source 1..23: mol_type = other RNA
tagtattttgtagagtcaacctg

SEQ ID NO: 4218 - RNA, 23 nt, synthetic construct
  source 1..23: mol_type = other RNA
tcatagtattttgtagagtcaac

SEQ ID NO: 4219 - RNA, 23 nt, synthetic construct
  source 1..23: mol_type = other RNA
tttcatagtattttgtagagtca

SEQ ID NO: 4220 - RNA, 23 nt, synthetic construct
  source 1..23: mol_type = other RNA
tcttcatagtattttgtagagtc

SEQ ID NO: 4221 - RNA, 23 nt, synthetic construct
  source 1..23: mol_type = other RNA
tcgacatagaagttgaagtgagt

SEQ ID NO: 4222 - RNA, 23 nt, synthetic construct
  source 1..23: mol_type = other RNA
tgctggaaaggtagagagactag

SEQ ID NO: 4223 - RNA, 23 nt, synthetic construct
  source 1..23: mol_type = other RNA
tcagtttctgtcgttgagaccga

SEQ ID NO: 4224 - RNA, 23 nt, synthetic construct
  source 1..23: mol_type = other RNA
tagactagtgttgggaagaggca

SEQ ID NO: 4225 - RNA, 23 nt, synthetic construct
  source 1..23: mol_type = other RNA
tgtatattgtagttaaagcacat

SEQ ID NO: 4226 - RNA, 23 nt, synthetic construct
  source 1..23: mol_type = other RNA
tcggttagtctgaaaggtggact

SEQ ID NO: 4227 - RNA, 23 nt, synthetic construct
  source 1..23: mol_type = other RNA
tacggttagtctgaaaggtggac

SEQ ID NO: 4228 - RNA, 23 nt, synthetic construct
  source 1..23: mol_type = other RNA
tgacggttagtctgaaaggtgga

SEQ ID NO: 4229 - RNA, 23 nt, synthetic construct
  source 1..23: mol_type = other RNA
ttcttattgtagatgatatcccc

SEQ ID NO: 4230 - RNA, 23 nt, synthetic construct
  source 1..23: mol_type = other RNA
tgcaaaggtacagtggtagagga

SEQ ID NO: 4231 - RNA, 23 nt, synthetic construct
  source 1..23: mol_type = other RNA
taggcaaaggtacagtggtagag

SEQ ID NO: 4232 - RNA, 23 nt, synthetic construct
  source 1..23: mol_type = other RNA
tagaatgatttgattgttgccct

SEQ ID NO: 4233 - RNA, 23 nt, synthetic construct
  source 1..23: mol_type = other RNA
tcactcgtagtggaagtggcaag

SEQ ID NO: 4234 - RNA, 23 nt, synthetic construct
  source 1..23: mol_type = other RNA
ttcacactcgtagtggaagtggc

SEQ ID NO: 4235 - RNA, 23 nt, synthetic construct
  source 1..23: mol_type = other RNA
tcttctgaagaaggcatctggag

SEQ ID NO: 4236 - RNA, 21 nt, synthetic construct
  source 1..21: mol_type = other RNA
  modified_base 1: mod_base = OTHER; note = 2'-O-methylcytidine-3'-phosphorothioate
  modified_base 2: mod_base = OTHER; note = 2'-O-methylcytidine-3'-phosphorothioate
  modified_base 3: mod_base = OTHER; note = 2'-O-methyladenosine-3'-phosphate
  modified_base 4: mod_base = OTHER; note = 2'-O-methylguanosine-3'-phosphate
  modified_base 5: mod_base = OTHER; note = 2'-O-methylcytidine-3'-phosphate
  modified_base 6: mod_base = OTHER; note = 2'-O-hexadecyl-uridine-3'-phosphate
  modified_base 7: mod_base = OTHER; note = 2'-deoxy-2'-fluoroguanosine-3'-phosphate
  modified_base 8: mod_base = OTHER; note = 2'-O-methyluridine-3'-phosphate
  modified_base 9: mod_base = OTHER; note = 2'-deoxy-2'-fluorocytidine-3'-phosphate
  modified_base 10: mod_base = OTHER; note = 2'-deoxy-2'-fluoroadenosine-3'-phosphate
  modified_base 11: mod_base = OTHER; note = 2'-deoxy-2'-fluoroguanosine-3'-phosphate
  modified_base 12: mod_base = OTHER; note = 2'-O-methyluridine-3'-phosphate
  modified_base 13: mod_base = OTHER; note = 2'-O-methylguanosine-3'-phosphate
  modified_base 14: mod_base = OTHER; note = 2'-O-methyladenosine-3'-phosphate
  modified_base 15: mod_base = OTHER; note = 2'-O-methylguanosine-3'-phosphate
  modified_base 16: mod_base = OTHER; note = 2'-O-methyluridine-3'-phosphate
  modified_base 17: mod_base = OTHER; note = 2'-O-methyluridine-3'-phosphate
  modified_base 18: mod_base = OTHER; note = 2'-O-methylcytidine-3'-phosphate
  modified_base 19: mod_base = OTHER; note = 2'-O-methyluridine-3'-phosphorothioate
  modified_base 20: mod_base = OTHER; note = 2'-O-methyladenosine-3'-phosphorothioate
  modified_base 21: mod_base = OTHER; note = 2'-O-methyladenosine
ccagctgtcagtgagttctaa

SEQ ID NO: 4237 - RNA, 21 nt, synthetic construct
  source 1..21: mol_type = other RNA
  modified_base 1: mod_base = OTHER; note = 2'-O-methyluridine-3'-phosphorothioate
  modified_base 2: mod_base = OTHER; note = 2'-O-methylguanosine-3'-phosphorothioate
  modified_base 3: mod_base = OTHER; note = 2'-O-methyladenosine-3'-phosphate
  modified_base 4: mod_base = OTHER; note = 2'-O-methyladenosine-3'-phosphate
  modified_base 5: mod_base = OTHER; note = 2'-O-methylcytidine-3'-phosphate
  modified_base 6: mod_base = OTHER; note = 2'-O-hexadecyl-uridine-3'-phosphate
  modified_base 7: mod_base = OTHER; note = 2'-deoxy-2'-fluorocytidine-3'-phosphate
  modified_base 8: mod_base = OTHER; note = 2'-O-methylcytidine-3'-phosphate
  modified_base 9: mod_base = OTHER; note = 2'-deoxy-2'-fluoroadenosine-3'-phosphate
  modified_base 10: mod_base = OTHER; note = 2'-deoxy-2'-fluorouridine-3'-phosphate
  modified_base 11: mod_base = OTHER; note = 2'-deoxy-2'-fluorocytidine-3'-phosphate
  modified_base 12: mod_base = OTHER; note = 2'-O-methyluridine-3'-phosphate
  modified_base 13: mod_base = OTHER; note = 2'-O-methyluridine-3'-phosphate
  modified_base 14: mod_base = OTHER; note = 2'-O-methyluridine-3'-phosphate
  modified_base 15: mod_base = OTHER; note = 2'-O-methyladenosine-3'-phosphate
  modified_base 16: mod_base = OTHER; note = 2'-O-methylcytidine-3'-phosphate
  modified_base 17: mod_base = OTHER; note = 2'-O-methylguanosine-3'-phosphate
  modified_base 18: mod_base = OTHER; note = 2'-O-methylcytidine-3'-phosphate
  modified_base 19: mod_base = OTHER; note = 2'-O-methyladenosine-3'-phosphorothioate
  modified_base 20: mod_base = OTHER; note = 2'-O-methylguanosine-3'-phosphorothioate
  modified_base 21: mod_base = OTHER; note = 2'-O-methyladenosine
tgaactccatctttacgcaga

SEQ ID NO: 4238 - RNA, 21 nt, synthetic construct
  source 1..21: mol_type = other RNA
  modified_base 1: mod_base = OTHER; note = 2'-O-methyladenosine-3'-phosphorothioate
  modified_base 2: mod_base = OTHER; note = 2'-O-methyluridine-3'-phosphorothioate
  modified_base 3: mod_base = OTHER; note = 2'-O-methylcytidine-3'-phosphate
  modified_base 4: mod_base = OTHER; note = 2'-O-methylcytidine-3'-phosphate
  modified_base 5: mod_base = OTHER; note = 2'-O-methyluridine-3'-phosphate
  modified_base 6: mod_base = OTHER; note = 2'-O-hexadecyl-uridine-3'-phosphate
  modified_base 7: mod_base = OTHER; note = 2'-deoxy-2'-fluorocytidine-3'-phosphate
  modified_base 8: mod_base = OTHER; note = 2'-O-methyluridine-3'-phosphate
  modified_base 9: mod_base = OTHER; note = 2'-deoxy-2'-fluorouridine-3'-phosphate
  modified_base 10: mod_base = OTHER; note = 2'-deoxy-2'-fluorocytidine-3'-phosphate
  modified_base 11: mod_base = OTHER; note = 2'-deoxy-2'-fluoroadenosine-3'-phosphate
  modified_base 12: mod_base = OTHER; note = 2'-O-methyluridine-3'-phosphate
  modified_base 13: mod_base = OTHER; note = 2'-O-methylcytidine-3'-phosphate
  modified_base 14: mod_base = OTHER; note = 2'-O-methyladenosine-3'-phosphate
  modified_base 15: mod_base = OTHER; note = 2'-O-methyluridine-3'-phosphate
  modified_base 16: mod_base = OTHER; note = 2'-O-methyladenosine-3'-phosphate
  modified_base 17: mod_base = OTHER; note = 2'-O-methylguanosine-3'-phosphate
  modified_base 18: mod_base = OTHER; note = 2'-O-methyluridine-3'-phosphate
  modified_base 19: mod_base = OTHER; note = 2'-O-methyladenosine-3'-phosphorothioate
  modified_base 20: mod_base = OTHER; note = 2'-O-methylcytidine-3'-phosphorothioate
  modified_base 21: mod_base = OTHER; note = 2'-O-methyladenosine
atccttcttcatcatagtaca

SEQ ID NO: 4239 - RNA, 21 nt, synthetic construct
  source 1..21: mol_type = other RNA
  modified_base 1: mod_base = OTHER; note = 2'-O-methylguanosine-3'-phosphorothioate
  modified_base 2: mod_base = OTHER; note = 2'-O-methylguanosine-3'-phosphorothioate
  modified_base 3: mod_base = OTHER; note = 2'-O-methyluridine-3'-phosphate
  modified_base 4: mod_base = OTHER; note = 2'-O-methyluridine-3'-phosphate
  modified_base 5: mod_base = OTHER; note = 2'-O-methylguanosine-3'-phosphate
  modified_base 6: mod_base = OTHER; note = 2'-O-hexadecyl-adenosine-3'-phosphate
  modified_base 7: mod_base = OTHER; note = 2'-deoxy-2'-fluorocytidine-3'-phosphate
  modified_base 8: mod_base = OTHER; note = 2'-O-methyluridine-3'-phosphate
  modified_base 9: mod_base = OTHER; note = 2'-deoxy-2'-fluorocytidine-3'-phosphate
  modified_base 10: mod_base = OTHER; note = 2'-deoxy-2'-fluorouridine-3'-phosphate
  modified_base 11: mod_base = OTHER; note = 2'-deoxy-2'-fluoroadenosine-3'-phosphate
  modified_base 12: mod_base = OTHER; note = 2'-O-methylcytidine-3'-phosphate
  modified_base 13: mod_base = OTHER; note = 2'-O-methyladenosine-3'-phosphate
  modified_base 14: mod_base = OTHER; note = 2'-O-methyladenosine-3'-phosphate
  modified_base 15: mod_base = OTHER; note = 2'-O-methyladenosine-3'-phosphate
  modified_base 16: mod_base = OTHER; note = 2'-O-methyladenosine-3'-phosphate
  modified_base 17: mod_base = OTHER; note = 2'-O-methyluridine-3'-phosphate
  modified_base 18: mod_base = OTHER; note = 2'-O-methyladenosine-3'-phosphate
  modified_base 19: mod_base = OTHER; note = 2'-O-methylcytidine-3'-phosphorothioate
  modified_base 20: mod_base = OTHER; note = 2'-O-methyluridine-3'-phosphorothioate
  modified_base 21: mod_base = OTHER; note = 2'-O-methyladenosine
ggttgactctacaaaatacta

SEQ ID NO: 4240 - RNA, 21 nt, synthetic construct
  source 1..21: mol_type = other RNA
  modified_base 1: mod_base = OTHER; note = 2'-O-methyluridine-3'-phosphorothioate
  modified_base 2: mod_base = OTHER; note = 2'-O-methylguanosine-3'-phosphorothioate
  modified_base 3: mod_base = OTHER; note = 2'-O-methyladenosine-3'-phosphate
  modified_base 4: mod_base = OTHER; note = 2'-O-methylcytidine-3'-phosphate
  modified_base 5: mod_base = OTHER; note = 2'-O-methyluridine-3'-phosphate
  modified_base 6: mod_base = OTHER; note = 2'-O-hexadecyl-cytidine-3'-phosphate
  modified_base 7: mod_base = OTHER; note = 2'-deoxy-2'-fluorouridine-3'-phosphate
  modified_base 8: mod_base = OTHER; note = 2'-O-methyladenosine-3'-phosphate
  modified_base 9: mod_base = OTHER; note = 2'-deoxy-2'-fluorocytidine-3'-phosphate
  modified_base 10: mod_base = OTHER; note = 2'-deoxy-2'-fluoroadenosine-3'-phosphate
  modified_base 11: mod_base = OTHER; note = 2'-deoxy-2'-fluoroadenosine-3'-phosphate
  modified_base 12: mod_base = OTHER; note = 2'-O-methyladenosine-3'-phosphate
  modified_base 13: mod_base = OTHER; note = 2'-O-methyladenosine-3'-phosphate
  modified_base 14: mod_base = OTHER; note = 2'-O-methyluridine-3'-phosphate
  modified_base 15: mod_base = OTHER; note = 2'-O-methyladenosine-3'-phosphate
  modified_base 16: mod_base = OTHER; note = 2'-O-methylcytidine-3'-phosphate
  modified_base 17: mod_base = OTHER; note = 2'-O-methyluridine-3'-phosphate
  modified_base 18: mod_base = OTHER; note = 2'-O-methyladenosine-3'-phosphate
  modified_base 19: mod_base = OTHER; note = 2'-O-methyluridine-3'-phosphorothioate
  modified_base 20: mod_base = OTHER; note = 2'-O-methylguanosine-3'-phosphorothioate
  modified_base 21: mod_base = OTHER; note = 2'-O-methyladenosine
tgactctacaaaatactatga

SEQ ID NO: 4241 - RNA, 21 nt, synthetic construct
  source 1..21: mol_type = other RNA
  modified_base 1: mod_base = OTHER; note = 2'-O-methyladenosine-3'-phosphorothioate
  modified_base 2: mod_base = OTHER; note = 2'-O-methylcytidine-3'-phosphorothioate
  modified_base 3: mod_base = OTHER; note = 2'-O-methyluridine-3'-phosphate
  modified_base 4: mod_base = OTHER; note = 2'-O-methylcytidine-3'-phosphate
  modified_base 5: mod_base = OTHER; note = 2'-O-methyluridine-3'-phosphate
  modified_base 6: mod_base = OTHER; note = 2'-O-hexadecyl-adenosine-3'-phosphate
  modified_base 7: mod_base = OTHER; note = 2'-deoxy-2'-fluorocytidine-3'-phosphate
  modified_base 8: mod_base = OTHER; note = 2'-O-methyladenosine-3'-phosphate
  modified_base 9: mod_base = OTHER; note = 2'-deoxy-2'-fluoroadenosine-3'-phosphate
  modified_base 10: mod_base = OTHER; note = 2'-deoxy-2'-fluoroadenosine-3'-phosphate
  modified_base 11: mod_base = OTHER; note = 2'-deoxy-2'-fluoroadenosine-3'-phosphate
  modified_base 12: mod_base = OTHER; note = 2'-O-methyluridine-3'-phosphate
  modified_base 13: mod_base = OTHER; note = 2'-O-methyladenosine-3'-phosphate
  modified_base 14: mod_base = OTHER; note = 2'-O-methylcytidine-3'-phosphate
  modified_base 15: mod_base = OTHER; note = 2'-O-methyluridine-3'-phosphate
  modified_base 16: mod_base = OTHER; note = 2'-O-methyladenosine-3'-phosphate
  modified_base 17: mod_base = OTHER; note = 2'-O-methyluridine-3'-phosphate
  modified_base 18: mod_base = OTHER; note = 2'-O-methylguanosine-3'-phosphate
  modified_base 19: mod_base = OTHER; note = 2'-O-methyladenosine-3'-phosphorothioate
  modified_base 20: mod_base = OTHER; note = 2'-O-methyladenosine-3'-phosphorothioate
  modified_base 21: mod_base = OTHER; note = 2'-O-methyladenosine
actctacaaaatactatgaaa

SEQ ID NO: 4242 - RNA, 21 nt, synthetic construct
  source 1..21: mol_type = other RNA
  modified_base 1: mod_base = OTHER; note = 2'-O-methylcytidine-3'-phosphorothioate
  modified_base 2: mod_base = OTHER; note = 2'-O-methyluridine-3'-phosphorothioate
  modified_base 3: mod_base = OTHER; note = 2'-O-methylcytidine-3'-phosphate
  modified_base 4: mod_base = OTHER; note = 2'-O-methyluridine-3'-phosphate
  modified_base 5: mod_base = OTHER; note = 2'-O-methyladenosine-3'-phosphate
  modified_base 6: mod_base = OTHER; note = 2'-O-hexadecyl-cytidine-3'-phosphate
  modified_base 7: mod_base = OTHER; note = 2'-deoxy-2'-fluoroadenosine-3'-phosphate
  modified_base 8: mod_base = OTHER; note = 2'-O-methyladenosine-3'-phosphate
  modified_base 9: mod_base = OTHER; note = 2'-deoxy-2'-fluoroadenosine-3'-phosphate
  modified_base 10: mod_base = OTHER; note = 2'-deoxy-2'-fluoroadenosine-3'-phosphate
  modified_base 11: mod_base = OTHER; note = 2'-deoxy-2'-fluorouridine-3'-phosphate
  modified_base 12: mod_base = OTHER; note = 2'-O-methyladenosine-3'-phosphate
  modified_base 13: mod_base = OTHER; note = 2'-O-methylcytidine-3'-phosphate
  modified_base 14: mod_base = OTHER; note = 2'-O-methyluridine-3'-phosphate
  modified_base 15: mod_base = OTHER; note = 2'-O-methyladenosine-3'-phosphate
  modified_base 16: mod_base = OTHER; note = 2'-O-methyluridine-3'-phosphate
  modified_base 17: mod_base = OTHER; note = 2'-O-methylguanosine-3'-phosphate
  modified_base 18: mod_base = OTHER; note = 2'-O-methyladenosine-3'-phosphate
  modified_base 19: mod_base = OTHER; note = 2'-O-methyladenosine-3'-phosphorothioate
  modified_base 20: mod_base = OTHER; note = 2'-O-methylguanosine-3'-phosphorothioate
  modified_base 21: mod_base = OTHER; note = 2'-O-methyladenosine
ctctacaaaatactatgaaga

SEQ ID NO: 4243 - RNA, 21 nt, synthetic construct
  source 1..21: mol_type = other RNA
  modified_base 1: mod_base = OTHER; note = 2'-O-methyluridine-3'-phosphorothioate
  modified_base 2: mod_base = OTHER; note = 2'-O-methylcytidine-3'-phosphorothioate
  modified_base 3: mod_base = OTHER; note = 2'-O-methyladenosine-3'-phosphate
  modified_base 4: mod_base = OTHER; note = 2'-O-methylcytidine-3'-phosphate
  modified_base 5: mod_base = OTHER; note = 2'-O-methyluridine-3'-phosphate
  modified_base 6: mod_base = OTHER; note = 2'-O-hexadecyl-uridine-3'-phosphate
  modified_base 7: mod_base = OTHER; note = 2'-deoxy-2'-fluorocytidine-3'-phosphate
  modified_base 8: mod_base = OTHER; note = 2'-O-methyladenosine-3'-phosphate
  modified_base 9: mod_base = OTHER; note = 2'-deoxy-2'-fluoroadenosine-3'-phosphate
  modified_base 10: mod_base = OTHER; note = 2'-deoxy-2'-fluorocytidine-3'-phosphate
  modified_base 11: mod_base = OTHER; note = 2'-deoxy-2'-fluorouridine-3'-phosphate
  modified_base 12: mod_base = OTHER; note = 2'-O-methyluridine-3'-phosphate
  modified_base 13: mod_base = OTHER; note = 2'-O-methylcytidine-3'-phosphate
  modified_base 14: mod_base = OTHER; note = 2'-O-methyluridine-3'-phosphate
  modified_base 15: mod_base = OTHER; note = 2'-O-methyladenosine-3'-phosphate
  modified_base 16: mod_base = OTHER; note = 2'-O-methyluridine-3'-phosphate
  modified_base 17: mod_base = OTHER; note = 2'-O-methylguanosine-3'-phosphate
  modified_base 18: mod_base = OTHER; note = 2'-O-methyluridine-3'-phosphate
  modified_base 19: mod_base = OTHER; note = 2'-O-methylcytidine-3'-phosphorothioate
  modified_base 20: mod_base = OTHER; note = 2'-O-methylguanosine-3'-phosphorothioate
  modified_base 21: mod_base = OTHER; note = 2'-O-methyladenosine
tcacttcaacttctatgtcga

SEQ ID NO: 4244 - RNA, 21 nt, synthetic construct
  source 1..21: mol_type = other RNA
  modified_base 1: mod_base = OTHER; note = 2'-O-methyladenosine-3'-phosphorothioate
  modified_base 2: mod_base = OTHER; note = 2'-O-methylguanosine-3'-phosphorothioate
  modified_base 3: mod_base = OTHER; note = 2'-O-methyluridine-3'-phosphate
  modified_base 4: mod_base = OTHER; note = 2'-O-methylcytidine-3'-phosphate
  modified_base 5: mod_base = OTHER; note = 2'-O-methyluridine-3'-phosphate
  modified_base 6: mod_base = OTHER; note = 2'-O-hexadecyl-cytidine-3'-phosphate
  modified_base 7: mod_base = OTHER; note = 2'-deoxy-2'-fluorouridine-3'-phosphate
  modified_base 8: mod_base = OTHER; note = 2'-O-methylcytidine-3'-phosphate
  modified_base 9: mod_base = OTHER; note = 2'-deoxy-2'-fluorouridine-3'-phosphate
  modified_base 10: mod_base = OTHER; note = 2'-deoxy-2'-fluoroadenosine-3'-phosphate
  modified_base 11: mod_base = OTHER; note = 2'-deoxy-2'-fluorocytidine-3'-phosphate
  modified_base 12: mod_base = OTHER; note = 2'-O-methylcytidine-3'-phosphate
  modified_base 13: mod_base = OTHER; note = 2'-O-methyluridine-3'-phosphate
  modified_base 14: mod_base = OTHER; note = 2'-O-methyluridine-3'-phosphate
  modified_base 15: mod_base = OTHER; note = 2'-O-methyluridine-3'-phosphate
  modified_base 16: mod_base = OTHER; note = 2'-O-methylcytidine-3'-phosphate
  modified_base 17: mod_base = OTHER; note = 2'-O-methylcytidine-3'-phosphate
  modified_base 18: mod_base = OTHER; note = 2'-O-methyladenosine-3'-phosphate
  modified_base 19: mod_base = OTHER; note = 2'-O-methylguanosine-3'-phosphorothioate
  modified_base 20: mod_base = OTHER; note = 2'-O-methylcytidine-3'-phosphorothioate
  modified_base 21: mod_base = OTHER; note = 2'-O-methyladenosine
agtctctctacctttccagca

SEQ ID NO: 4245 - RNA, 21 nt, synthetic construct
  source 1..21: mol_type = other RNA
  modified_base 1: mod_base = OTHER; note = 2'-O-methylguanosine-3'-phosphorothioate
  modified_base 2: mod_base = OTHER; note = 2'-O-methylguanosine-3'-phosphorothioate
  modified_base 3: mod_base = OTHER; note = 2'-O-methyluridine-3'-phosphate
  modified_base 4: mod_base = OTHER; note = 2'-O-methylcytidine-3'-phosphate
  modified_base 5: mod_base = OTHER; note = 2'-O-methyluridine-3'-phosphate
  modified_base 6: mod_base = OTHER; note = 2'-O-hexadecyl-cytidine-3'-phosphate
  modified_base 7: mod_base = OTHER; note = 2'-deoxy-2'-fluoroadenosine-3'-phosphate
  modified_base 8: mod_base = OTHER; note = 2'-O-methyladenosine-3'-phosphate
  modified_base 9: mod_base = OTHER; note = 2'-deoxy-2'-fluorocytidine-3'-phosphate
  modified_base 10: mod_base = OTHER; note = 2'-deoxy-2'-fluoroguanosine-3'-phosphate
  modified_base 11: mod_base = OTHER; note = 2'-deoxy-2'-fluoroadenosine-3'-phosphate
  modified_base 12: mod_base = OTHER; note = 2'-O-methylcytidine-3'-phosphate
  modified_base 13: mod_base = OTHER; note = 2'-O-methyladenosine-3'-phosphate
  modified_base 14: mod_base = OTHER; note = 2'-O-methylguanosine-3'-phosphate
  modified_base 15: mod_base = OTHER; note = 2'-O-methyladenosine-3'-phosphate
  modified_base 16: mod_base = OTHER; note = 2'-O-methyladenosine-3'-phosphate
  modified_base 17: mod_base = OTHER; note = 2'-O-methyladenosine-3'-phosphate
  modified_base 18: mod_base = OTHER; note = 2'-O-methylcytidine-3'-phosphate
  modified_base 19: mod_base = OTHER; note = 2'-O-methyluridine-3'-phosphorothioate
  modified_base 20: mod_base = OTHER; note = 2'-O-methylguanosine-3'-phosphorothioate
  modified_base 21: mod_base = OTHER; note = 2'-O-methyladenosine
ggtctcaacgacagaaactga

SEQ ID NO: 4246 - RNA, 21 nt, synthetic construct
  source 1..21: mol_type = other RNA
  modified_base 1: mod_base = OTHER; note = 2'-O-methylcytidine-3'-phosphorothioate
  modified_base 2: mod_base = OTHER; note = 2'-O-methylcytidine-3'-phosphorothioate
  modified_base 3: mod_base = OTHER; note = 2'-O-methyluridine-3'-phosphate
  modified_base 4: mod_base = OTHER; note = 2'-O-methylcytidine-3'-phosphate
  modified_base 5: mod_base = OTHER; note = 2'-O-methyluridine-3'-phosphate
  modified_base 6: mod_base = OTHER; note = 2'-O-hexadecyl-uridine-3'-phosphate
  modified_base 7: mod_base = OTHER; note = 2'-deoxy-2'-fluorocytidine-3'-phosphate
  modified_base 8: mod_base = OTHER; note = 2'-O-methylcytidine-3'-phosphate
  modified_base 9: mod_base = OTHER; note = 2'-deoxy-2'-fluorocytidine-3'-phosphate
  modified_base 10: mod_base = OTHER; note = 2'-deoxy-2'-fluoroadenosine-3'-phosphate
  modified_base 11: mod_base = OTHER; note = 2'-deoxy-2'-fluoroadenosine-3'-phosphate
  modified_base 12: mod_base = OTHER; note = 2'-O-methylcytidine-3'-phosphate
  modified_base 13: mod_base = OTHER; note = 2'-O-methyladenosine-3'-phosphate
  modified_base 14: mod_base = OTHER; note = 2'-O-methylcytidine-3'-phosphate
  modified_base 15: mod_base = OTHER; note = 2'-O-methyluridine-3'-phosphate
  modified_base 16: mod_base = OTHER; note = 2'-O-methyladenosine-3'-phosphate
  modified_base 17: mod_base = OTHER; note = 2'-O-methylguanosine-3'-phosphate
  modified_base 18: mod_base = OTHER; note = 2'-O-methyluridine-3'-phosphate
  modified_base 19: mod_base = OTHER; note = 2'-O-methylcytidine-3'-phosphorothioate
  modified_base 20: mod_base = OTHER; note = 2'-O-methyluridine-3'-phosphorothioate
  modified_base 21: mod_base = OTHER; note = 2'-O-methyladenosine
cctcttcccaacactagtcta

SEQ ID NO: 4247 - RNA, 21 nt, synthetic construct
  source 1..21: mol_type = other RNA
  modified_base 1: mod_base = OTHER; note = 2'-O-methylguanosine-3'-phosphorothioate
  modified_base 2: mod_base = OTHER; note = 2'-O-methyluridine-3'-phosphorothioate
  modified_base 3: mod_base = OTHER; note = 2'-O-methylguanosine-3'-phosphate
  modified_base 4: mod_base = OTHER; note = 2'-O-methylcytidine-3'-phosphate
  modified_base 5: mod_base = OTHER; note = 2'-O-methyluridine-3'-phosphate
  modified_base 6: mod_base = OTHER; note = 2'-O-hexadecyl-uridine-3'-phosphate
  modified_base 7: mod_base = OTHER; note = 2'-deoxy-2'-fluorouridine-3'-phosphate
  modified_base 8: mod_base = OTHER; note = 2'-O-methyladenosine-3'-phosphate
  modified_base 9: mod_base = OTHER; note = 2'-deoxy-2'-fluoroadenosine-3'-phosphate
  modified_base 10: mod_base = OTHER; note = 2'-deoxy-2'-fluorocytidine-3'-phosphate
  modified_base 11: mod_base = OTHER; note = 2'-deoxy-2'-fluorouridine-3'-phosphate
  modified_base 12: mod_base = OTHER; note = 2'-O-methyladenosine-3'-phosphate
  modified_base 13: mod_base = OTHER; note = 2'-O-methylcytidine-3'-phosphate
  modified_base 14: mod_base = OTHER; note = 2'-O-methyladenosine-3'-phosphate
  modified_base 15: mod_base = OTHER; note = 2'-O-methyladenosine-3'-phosphate
  modified_base 16: mod_base = OTHER; note = 2'-O-methyluridine-3'-phosphate
  modified_base 17: mod_base = OTHER; note = 2'-O-methyladenosine-3'-phosphate
  modified_base 18: mod_base = OTHER; note = 2'-O-methyluridine-3'-phosphate
  modified_base 19: mod_base = OTHER; note = 2'-O-methyladenosine-3'-phosphorothioate
  modified_base 20: mod_base = OTHER; note = 2'-O-methylcytidine-3'-phosphorothioate
  modified_base 21: mod_base = OTHER; note = 2'-O-methyladenosine
gtgctttaactacaatataca

SEQ ID NO: 4248 - RNA, 21 nt, synthetic construct
  source 1..21: mol_type = other RNA
  modified_base 1: mod_base = OTHER; note = 2'-O-methyluridine-3'-phosphorothioate
  modified_base 2: mod_base = OTHER; note = 2'-O-methylcytidine-3'-phosphorothioate
  modified_base 3: mod_base = OTHER; note = 2'-O-methylcytidine-3'-phosphate
  modified_base 4: mod_base = OTHER; note = 2'-O-methyladenosine-3'-phosphate
  modified_base 5: mod_base = OTHER; note = 2'-O-methylcytidine-3'-phosphate
  modified_base 6: mod_base = OTHER; note = 2'-O-hexadecyl-cytidine-3'-phosphate
  modified_base 7: mod_base = OTHER; note = 2'-deoxy-2'-fluorouridine-3'-phosphate
  modified_base 8: mod_base = OTHER; note = 2'-O-methyluridine-3'-phosphate
  modified_base 9: mod_base = OTHER; note = 2'-deoxy-2'-fluorouridine-3'-phosphate
  modified_base 10: mod_base = OTHER; note = 2'-deoxy-2'-fluorocytidine-3'-phosphate
  modified_base 11: mod_base = OTHER; note = 2'-deoxy-2'-fluoroadenosine-3'-phosphate
  modified_base 12: mod_base = OTHER; note = 2'-O-methylguanosine-3'-phosphate
  modified_base 13: mod_base = OTHER; note = 2'-O-methyladenosine-3'-phosphate
  modified_base 14: mod_base = OTHER; note = 2'-O-methylcytidine-3'-phosphate
  modified_base 15: mod_base = OTHER; note = 2'-O-methyluridine-3'-phosphate
  modified_base 16: mod_base = OTHER; note = 2'-O-methyladenosine-3'-phosphate
  modified_base 17: mod_base = OTHER; note = 2'-O-methyladenosine-3'-phosphate
  modified_base 18: mod_base = OTHER; note = 2'-O-methylcytidine-3'-phosphate
  modified_base 19: mod_base = OTHER; note = 2'-O-methylcytidine-3'-phosphorothioate
  modified_base 20: mod_base = OTHER; note = 2'-O-methylguanosine-3'-phosphorothioate
  modified_base 21: mod_base = OTHER; note = 2'-O-methyladenosine
tccacctttcagactaaccga

SEQ ID NO: 4249 - RNA, 21 nt, synthetic construct
  source 1..21: mol_type = other RNA
  modified_base 1: mod_base = OTHER; note = 2'-O-methylcytidine-3'-phosphorothioate
  modified_base 2: mod_base = OTHER; note = 2'-O-methylcytidine-3'-phosphorothioate
  modified_base 3: mod_base = OTHER; note = 2'-O-methyladenosine-3'-phosphate
  modified_base 4: mod_base = OTHER; note = 2'-O-methylcytidine-3'-phosphate
  modified_base 5: mod_base = OTHER; note = 2'-O-methylcytidine-3'-phosphate
  modified_base 6: mod_base = OTHER; note = 2'-O-hexadecyl-uridine-3'-phosphate
  modified_base 7: mod_base = OTHER; note = 2'-deoxy-2'-fluorouridine-3'-phosphate
  modified_base 8: mod_base = OTHER; note = 2'-O-methyluridine-3'-phosphate
  modified_base 9: mod_base = OTHER; note = 2'-deoxy-2'-fluorocytidine-3'-phosphate
  modified_base 10: mod_base = OTHER; note = 2'-deoxy-2'-fluoroadenosine-3'-phosphate
  modified_base 11: mod_base = OTHER; note = 2'-deoxy-2'-fluoroguanosine-3'-phosphate
  modified_base 12: mod_base = OTHER; note = 2'-O-methyladenosine-3'-phosphate
  modified_base 13: mod_base = OTHER; note = 2'-O-methylcytidine-3'-phosphate
  modified_base 14: mod_base = OTHER; note = 2'-O-methyluridine-3'-phosphate
  modified_base 15: mod_base = OTHER; note = 2'-O-methyladenosine-3'-phosphate
  modified_base 16: mod_base = OTHER; note = 2'-O-methyladenosine-3'-phosphate
  modified_base 17: mod_base = OTHER; note = 2'-O-methylcytidine-3'-phosphate
  modified_base 18: mod_base = OTHER; note = 2'-O-methylcytidine-3'-phosphate
  modified_base 19: mod_base = OTHER; note = 2'-O-methylguanosine-3'-phosphorothioate
  modified_base 20: mod_base = OTHER; note = 2'-O-methyluridine-3'-phosphorothioate
  modified_base 21: mod_base = OTHER; note = 2'-O-methyladenosine
ccacctttcagactaaccgta

SEQ ID NO: 4250 - RNA, 21 nt, synthetic construct
  source 1..21: mol_type = other RNA
  modified_base 1: mod_base = OTHER; note = 2'-O-methylcytidine-3'-phosphorothioate
  modified_base 2: mod_base = OTHER; note = 2'-O-methyladenosine-3'-phosphorothioate
  modified_base 3: mod_base = OTHER; note = 2'-O-methylcytidine-3'-phosphate
  modified_base 4: mod_base = OTHER; note = 2'-O-methylcytidine-3'-phosphate
  modified_base 5: mod_base = OTHER; note = 2'-O-methyluridine-3'-phosphate
  modified_base 6: mod_base = OTHER; note = 2'-O-hexadecyl-uridine-3'-phosphate
  modified_base 7: mod_base = OTHER; note = 2'-deoxy-2'-fluorouridine-3'-phosphate
  modified_base 8: mod_base = OTHER; note = 2'-O-methylcytidine-3'-phosphate
  modified_base 9: mod_base = OTHER; note = 2'-deoxy-2'-fluoroadenosine-3'-phosphate
  modified_base 10: mod_base = OTHER; note = 2'-deoxy-2'-fluoroguanosine-3'-phosphate
  modified_base 11: mod_base = OTHER; note = 2'-deoxy-2'-fluoroadenosine-3'-phosphate
  modified_base 12: mod_base = OTHER; note = 2'-O-methylcytidine-3'-phosphate
  modified_base 13: mod_base = OTHER; note = 2'-O-methyluridine-3'-phosphate
  modified_base 14: mod_base = OTHER; note = 2'-O-methyladenosine-3'-phosphate
  modified_base 15: mod_base = OTHER; note = 2'-O-methyladenosine-3'-phosphate
  modified_base 16: mod_base = OTHER; note = 2'-O-methylcytidine-3'-phosphate
  modified_base 17: mod_base = OTHER; note = 2'-O-methylcytidine-3'-phosphate
  modified_base 18: mod_base = OTHER; note = 2'-O-methylguanosine-3'-phosphate
  modified_base 19: mod_base = OTHER; note = 2'-O-methyluridine-3'-phosphorothioate
  modified_base 20: mod_base = OTHER; note = 2'-O-methylcytidine-3'-phosphorothioate
  modified_base 21: mod_base = OTHER; note = 2'-O-methyladenosine
cacctttcagactaaccgtca

SEQ ID NO: 4251 - RNA, 21 nt, synthetic construct
  source 1..21: mol_type = other RNA
  modified_base 1: mod_base = OTHER; note = 2'-O-methylguanosine-3'-phosphorothioate
  modified_base 2: mod_base = OTHER; note = 2'-O-methylguanosine-3'-phosphorothioate
  modified_base 3: mod_base = OTHER; note = 2'-O-methyladenosine-3'-phosphate
  modified_base 4: mod_base = OTHER; note = 2'-O-methyluridine-3'-phosphate
  modified_base 5: mod_base = OTHER; note = 2'-O-methyladenosine-3'-phosphate
  modified_base 6: mod_base = OTHER; note = 2'-O-hexadecyl-uridine-3'-phosphate
  modified_base 7: mod_base = OTHER; note = 2'-deoxy-2'-fluorocytidine-3'-phosphate
  modified_base 8: mod_base = OTHER; note = 2'-O-methyladenosine-3'-phosphate
  modified_base 9: mod_base = OTHER; note = 2'-deoxy-2'-fluorouridine-3'-phosphate
  modified_base 10: mod_base = OTHER; note = 2'-deoxy-2'-fluorocytidine-3'-phosphate
  modified_base 11: mod_base = OTHER; note = 2'-deoxy-2'-fluorouridine-3'-phosphate
  modified_base 12: mod_base = OTHER; note = 2'-O-methyladenosine-3'-phosphate
  modified_base 13: mod_base = OTHER; note = 2'-O-methylcytidine-3'-phosphate
  modified_base 14: mod_base = OTHER; note = 2'-O-methyladenosine-3'-phosphate
  modified_base 15: mod_base = OTHER; note = 2'-O-methyladenosine-3'-phosphate
  modified_base 16: mod_base = OTHER; note = 2'-O-methyluridine-3'-phosphate
  modified_base 17: mod_base = OTHER; note = 2'-O-methyladenosine-3'-phosphate
  modified_base 18: mod_base = OTHER; note = 2'-O-methyladenosine-3'-phosphate
  modified_base 19: mod_base = OTHER; note = 2'-O-methylguanosine-3'-phosphorothioate
  modified_base 20: mod_base = OTHER; note = 2'-O-methyladenosine-3'-phosphorothioate
  modified_base 21: mod_base = OTHER; note = 2'-O-methyladenosine
ggatatcatctacaataagaa

SEQ ID NO: 4252 - RNA, 21 nt, synthetic construct
  source 1..21: mol_type = other RNA
  modified_base 1: mod_base = OTHER; note = 2'-O-methylcytidine-3'-phosphorothioate
  modified_base 2: mod_base = OTHER; note = 2'-O-methyluridine-3'-phosphorothioate
  modified_base 3: mod_base = OTHER; note = 2'-O-methylcytidine-3'-phosphate
  modified_base 4: mod_base = OTHER; note = 2'-O-methyluridine-3'-phosphate
  modified_base 5: mod_base = OTHER; note = 2'-O-methyladenosine-3'-phosphate
  modified_base 6: mod_base = OTHER; note = 2'-O-hexadecyl-cytidine-3'-phosphate
  modified_base 7: mod_base = OTHER; note = 2'-deoxy-2'-fluorocytidine-3'-phosphate
  modified_base 8: mod_base = OTHER; note = 2'-O-methyladenosine-3'-phosphate
  modified_base 9: mod_base = OTHER; note = 2'-deoxy-2'-fluorocytidine-3'-phosphate
  modified_base 10: mod_base = OTHER; note = 2'-deoxy-2'-fluorouridine-3'-phosphate
  modified_base 11: mod_base = OTHER; note = 2'-deoxy-2'-fluoroguanosine-3'-phosphate
  modified_base 12: mod_base = OTHER; note = 2'-O-methyluridine-3'-phosphate
  modified_base 13: mod_base = OTHER; note = 2'-O-methyladenosine-3'-phosphate
  modified_base 14: mod_base = OTHER; note = 2'-O-methylcytidine-3'-phosphate
  modified_base 15: mod_base = OTHER; note = 2'-O-methylcytidine-3'-phosphate
  modified_base 16: mod_base = OTHER; note = 2'-O-methyluridine-3'-phosphate
  modified_base 17: mod_base = OTHER; note = 2'-O-methyluridine-3'-phosphate
  modified_base 18: mod_base = OTHER; note = 2'-O-methyluridine-3'-phosphate
  modified_base 19: mod_base = OTHER; note = 2'-O-methylguanosine-3'-phosphorothioate
  modified_base 20: mod_base = OTHER; note = 2'-O-methylcytidine-3'-phosphorothioate
  modified_base 21: mod_base = OTHER; note = 2'-O-methyladenosine
ctctaccactgtacctttgca

SEQ ID NO: 4253 - RNA, 21 nt, synthetic construct
  source 1..21: mol_type = other RNA
  modified_base 1: mod_base = OTHER; note = 2'-O-methylcytidine-3'-phosphorothioate
  modified_base 2: mod_base = OTHER; note = 2'-O-methyluridine-3'-phosphorothioate
  modified_base 3: mod_base = OTHER; note = 2'-O-methyladenosine-3'-phosphate
  modified_base 4: mod_base = OTHER; note = 2'-O-methylcytidine-3'-phosphate
  modified_base 5: mod_base = OTHER; note = 2'-O-methylcytidine-3'-phosphate
  modified_base 6: mod_base = OTHER; note = 2'-O-hexadecyl-adenosine-3'-phosphate
  modified_base 7: mod_base = OTHER; note = 2'-deoxy-2'-fluorocytidine-3'-phosphate
  modified_base 8: mod_base = OTHER; note = 2'-O-methyluridine-3'-phosphate
  modified_base 9: mod_base = OTHER; note = 2'-deoxy-2'-fluoroguanosine-3'-phosphate
  modified_base 10: mod_base = OTHER; note = 2'-deoxy-2'-fluorouridine-3'-phosphate
  modified_base 11: mod_base = OTHER; note = 2'-deoxy-2'-fluoroadenosine-3'-phosphate
  modified_base 12: mod_base = OTHER; note = 2'-O-methylcytidine-3'-phosphate
  modified_base 13: mod_base = OTHER; note = 2'-O-methylcytidine-3'-phosphate
  modified_base 14: mod_base = OTHER; note = 2'-O-methyluridine-3'-phosphate
  modified_base 15: mod_base = OTHER; note = 2'-O-methyluridine-3'-phosphate
  modified_base 16: mod_base = OTHER; note = 2'-O-methyluridine-3'-phosphate
  modified_base 17: mod_base = OTHER; note = 2'-O-methylguanosine-3'-phosphate
  modified_base 18: mod_base = OTHER; note = 2'-O-methylcytidine-3'-phosphate
  modified_base 19: mod_base = OTHER; note = 2'-O-methylcytidine-3'-phosphorothioate
  modified_base 20: mod_base = OTHER; note = 2'-O-methyluridine-3'-phosphorothioate
  modified_base 21: mod_base = OTHER; note = 2'-O-methyladenosine
ctaccactgtacctttgccta

SEQ ID NO: 4254 - RNA, 21 nt, synthetic construct
  source 1..21: mol_type = other RNA
  modified_base 1: mod_base = OTHER; note = 2'-O-methylguanosine-3'-phosphorothioate
  modified_base 2: mod_base = OTHER; note = 2'-O-methylguanosine-3'-phosphorothioate
  modified_base 3: mod_base = OTHER; note = 2'-O-methylcytidine-3'-phosphate
  modified_base 4: mod_base = OTHER; note = 2'-O-methyladenosine-3'-phosphate
  modified_base 5: mod_base = OTHER; note = 2'-O-methyladenosine-3'-phosphate
  modified_base 6: mod_base = OTHER; note = 2'-O-hexadecyl-cytidine-3'-phosphate
  modified_base 7: mod_base = OTHER; note = 2'-deoxy-2'-fluoroadenosine-3'-phosphate
  modified_base 8: mod_base = OTHER; note = 2'-O-methyladenosine-3'-phosphate
  modified_base 9: mod_base = OTHER; note = 2'-deoxy-2'-fluorouridine-3'-phosphate
  modified_base 10: mod_base = OTHER; note = 2'-deoxy-2'-fluorocytidine-3'-phosphate
  modified_base 11: mod_base = OTHER; note = 2'-deoxy-2'-fluoroadenosine-3'-phosphate
  modified_base 12: mod_base = OTHER; note = 2'-O-methyladenosine-3'-phosphate
  modified_base 13: mod_base = OTHER; note = 2'-O-methyladenosine-3'-phosphate
  modified_base 14: mod_base = OTHER; note = 2'-O-methyluridine-3'-phosphate
  modified_base 15: mod_base = OTHER; note = 2'-O-methylcytidine-3'-phosphate
  modified_base 16: mod_base = OTHER; note = 2'-O-methyladenosine-3'-phosphate
  modified_base 17: mod_base = OTHER; note = 2'-O-methyluridine-3'-phosphate
  modified_base 18: mod_base = OTHER; note = 2'-O-methyluridine-3'-phosphate
  modified_base 19: mod_base = OTHER; note = 2'-O-methylcytidine-3'-phosphorothioate
  modified_base 20: mod_base = OTHER; note = 2'-O-methyluridine-3'-phosphorothioate
  modified_base 21: mod_base = OTHER; note = 2'-O-methyladenosine
ggcaacaatcaaatcattcta

SEQ ID NO: 4255 - RNA, 21 nt, synthetic construct
  source 1..21: mol_type = other RNA
  modified_base 1: mod_base = OTHER; note = 2'-O-methyluridine-3'-phosphorothioate
  modified_base 2: mod_base = OTHER; note = 2'-O-methylguanosine-3'-phosphorothioate
  modified_base 3: mod_base = OTHER; note = 2'-O-methylcytidine-3'-phosphate
  modified_base 4: mod_base = OTHER; note = 2'-O-methylcytidine-3'-phosphate
  modified_base 5: mod_base = OTHER; note = 2'-O-methyladenosine-3'-phosphate
  modified_base 6: mod_base = OTHER; note = 2'-O-hexadecyl-cytidine-3'-phosphate
  modified_base 7: mod_base = OTHER; note = 2'-deoxy-2'-fluorouridine-3'-phosphate
  modified_base 8: mod_base = OTHER; note = 2'-O-methyluridine-3'-phosphate
  modified_base 9: mod_base = OTHER; note = 2'-deoxy-2'-fluorocytidine-3'-phosphate
  modified_base 10: mod_base = OTHER; note = 2'-deoxy-2'-fluorocytidine-3'-phosphate
  modified_base 11: mod_base = OTHER; note = 2'-deoxy-2'-fluoroadenosine-3'-phosphate
  modified_base 12: mod_base = OTHER; note = 2'-O-methylcytidine-3'-phosphate
  modified_base 13: mod_base = OTHER; note = 2'-O-methyluridine-3'-phosphate
  modified_base 14: mod_base = OTHER; note = 2'-O-methyladenosine-3'-phosphate
  modified_base 15: mod_base = OTHER; note = 2'-O-methylcytidine-3'-phosphate
  modified_base 16: mod_base = OTHER; note = 2'-O-methylguanosine-3'-phosphate
  modified_base 17: mod_base = OTHER; note = 2'-O-methyladenosine-3'-phosphate
  modified_base 18: mod_base = OTHER; note = 2'-O-methylguanosine-3'-phosphate
  modified_base 19: mod_base = OTHER; note = 2'-O-methyluridine-3'-phosphorothioate
  modified_base 20: mod_base = OTHER; note = 2'-O-methylguanosine-3'-phosphorothioate
  modified_base 21: mod_base = OTHER; note = 2'-O-methyladenosine
tgccacttccactacgagtga

SEQ ID NO: 4256 - RNA, 21 nt, synthetic construct
  source 1..21: mol_type = other RNA
  modified_base 1: mod_base = OTHER; note = 2'-O-methylcytidine-3'-phosphorothioate
  modified_base 2: mod_base = OTHER; note = 2'-O-methyladenosine-3'-phosphorothioate
  modified_base 3: mod_base = OTHER; note = 2'-O-methylcytidine-3'-phosphate
  modified_base 4: mod_base = OTHER; note = 2'-O-methyluridine-3'-phosphate
  modified_base 5: mod_base = OTHER; note = 2'-O-methyluridine-3'-phosphate
  modified_base 6: mod_base = OTHER; note = 2'-O-hexadecyl-cytidine-3'-phosphate
  modified_base 7: mod_base = OTHER; note = 2'-deoxy-2'-fluorocytidine-3'-phosphate
  modified_base 8: mod_base = OTHER; note = 2'-O-methyladenosine-3'-phosphate
  modified_base 9: mod_base = OTHER; note = 2'-deoxy-2'-fluorocytidine-3'-phosphate
  modified_base 10: mod_base = OTHER; note = 2'-deoxy-2'-fluorouridine-3'-phosphate
  modified_base 11: mod_base = OTHER; note = 2'-deoxy-2'-fluoroadenosine-3'-phosphate
  modified_base 12: mod_base = OTHER; note = 2'-O-methylcytidine-3'-phosphate
  modified_base 13: mod_base = OTHER; note = 2'-O-methylguanosine-3'-phosphate
  modified_base 14: mod_base = OTHER; note = 2'-O-methyladenosine-3'-phosphate
  modified_base 15: mod_base = OTHER; note = 2'-O-methylguanosine-3'-phosphate
  modified_base 16: mod_base = OTHER; note = 2'-O-methyluridine-3'-phosphate
  modified_base 17: mod_base = OTHER; note = 2'-O-methylguanosine-3'-phosphate
  modified_base 18: mod_base = OTHER; note = 2'-O-methyluridine-3'-phosphate
  modified_base 19: mod_base = OTHER; note = 2'-O-methylguanosine-3'-phosphorothioate
  modified_base 20: mod_base = OTHER; note = 2'-O-methyladenosine-3'-phosphorothioate
  modified_base 21: mod_base = OTHER; note = 2'-O-methyladenosine
cacttccactacgagtgtgaa

SEQ ID NO: 4257 - RNA, 21 nt, synthetic construct
  source 1..21: mol_type = other RNA
  modified_base 1: mod_base = OTHER; note = 2'-O-methylcytidine-3'-phosphorothioate
  modified_base 2: mod_base = OTHER; note = 2'-O-methylcytidine-3'-phosphorothioate
  modified_base 3: mod_base = OTHER; note = 2'-O-methyladenosine-3'-phosphate
  modified_base 4: mod_base = OTHER; note = 2'-O-methylguanosine-3'-phosphate
  modified_base 5: mod_base = OTHER; note = 2'-O-methyladenosine-3'-phosphate
  modified_base 6: mod_base = OTHER; note = 2'-O-hexadecyl-uridine-3'-phosphate
  modified_base 7: mod_base = OTHER; note = 2'-deoxy-2'-fluoroguanosine-3'-phosphate
  modified_base 8: mod_base = OTHER; note = 2'-O-methylcytidine-3'-phosphate
  modified_base 9: mod_base = OTHER; note = 2'-deoxy-2'-fluorocytidine-3'-phosphate
  modified_base 10: mod_base = OTHER; note = 2'-deoxy-2'-fluorouridine-3'-phosphate
  modified_base 11: mod_base = OTHER; note = 2'-deoxy-2'-fluorouridine-3'-phosphate
  modified_base 12: mod_base = OTHER; note = 2'-O-methylcytidine-3'-phosphate
  modified_base 13: mod_base = OTHER; note = 2'-O-methyluridine-3'-phosphate
  modified_base 14: mod_base = OTHER; note = 2'-O-methyluridine-3'-phosphate
  modified_base 15: mod_base = OTHER; note = 2'-O-methylcytidine-3'-phosphate
  modified_base 16: mod_base = OTHER; note = 2'-O-methyladenosine-3'-phosphate
  modified_base 17: mod_base = OTHER; note = 2'-O-methylguanosine-3'-phosphate
  modified_base 18: mod_base = OTHER; note = 2'-O-methyladenosine-3'-phosphate
  modified_base 19: mod_base = OTHER; note = 2'-O-methyladenosine-3'-phosphorothioate
  modified_base 20: mod_base = OTHER; note = 2'-O-methylguanosine-3'-phosphorothioate
  modified_base 21: mod_base = OTHER; note = 2'-O-methyladenosine
ccagatgccttcttcagaaga

SEQ ID NO: 4258 - RNA, 23 nt, synthetic construct
  source 1..23: mol_type = other RNA
  modified_base 1: mod_base = OTHER; note = 2'-O-methyluridine-3'-phosphorothioate 5'-(E)-Vinylphosphonate
  modified_base 2: mod_base = OTHER; note = 2'-deoxy-2'-fluorouridine-3'-phosphorothioate
  modified_base 3: mod_base = OTHER; note = 2'-O-methyladenosine-3'-phosphate
  modified_base 4: mod_base = OTHER; note = 2'-O-methylguanosine-3'-phosphate
  modified_base 5: mod_base = OTHER; note = 2'-O-methyladenosine-3'-phosphate
  modified_base 6: mod_base = OTHER; note = 2'-deoxy-2'-fluoroadenosine-3'-phosphate
  modified_base 7: mod_base = OTHER; note = 2'-O-methylcytidine-3'-phosphate
  modified_base 8: mod_base = OTHER; note = 2'-deoxy-2'-fluorouridine-3'-phosphate
  modified_base 9: mod_base = OTHER; note = 2'-deoxy-2'-fluorocytidine-3'-phosphate
  modified_base 10: mod_base = OTHER; note = 2'-O-methyladenosine-3'-phosphate
  modified_base 11: mod_base = OTHER; note = 2'-O-methylcytidine-3'-phosphate
  modified_base 12: mod_base = OTHER; note = 2'-O-methyluridine-3'-phosphate
  modified_base 13: mod_base = OTHER; note = 2'-O-methylguanosine-3'-phosphate
  modified_base 14: mod_base = OTHER; note = 2'-deoxy-2'-fluoroadenosine-3'-phosphate
  modified_base 15: mod_base = OTHER; note = 2'-O-methylcytidine-3'-phosphate
  modified_base 16: mod_base = OTHER; note = 2'-deoxy-2'-fluoroadenosine-3'-phosphate
  modified_base 17: mod_base = OTHER; note = 2'-O-methylguanosine-3'-phosphate
  modified_base 18: mod_base = OTHER; note = 2'-O-methylcytidine-3'-phosphate
  modified_base 19: mod_base = OTHER; note = 2'-O-methyluridine-3'-phosphate
  modified_base 20: mod_base = OTHER; note = 2'-O-methylguanosine-3'-phosphate
  modified_base 21: mod_base = OTHER; note = 2'-O-methylguanosine-3'-phosphorothioate
  modified_base 22: mod_base = OTHER; note = 2'-O-methylguanosine-3'-phosphorothioate
  modified_base 23: mod_base = OTHER; note = 2'-O-methyladenosine
ttagaactcactgacagctggga

SEQ ID NO: 4259 - RNA, 23 nt, synthetic construct
  source 1..23: mol_type = other RNA
  modified_base 1: mod_base = OTHER; note = 2'-O-methyluridine-3'-phosphorothioate 5'-(E)-Vinylphosphonate
  modified_base 2: mod_base = OTHER; note = 2'-deoxy-2'-fluorocytidine-3'-phosphorothioate
  modified_base 3: mod_base = OTHER; note = 2'-O-methyluridine-3'-phosphate
  modified_base 4: mod_base = OTHER; note = 2'-O-methylguanosine-3'-phosphate
  modified_base 5: mod_base = OTHER; note = 2'-O-methylcytidine-3'-phosphate
  modified_base 6: mod_base = OTHER; note = 2'-deoxy-2'-fluoroguanosine-3'-phosphate
  modified_base 7: mod_base = OTHER; note = 2'-O-methyluridine-3'-phosphate
  modified_base 8: mod_base = OTHER; note = 2'-deoxy-2'-fluoroadenosine-3'-phosphate
  modified_base 9: mod_base = OTHER; note = 2'-deoxy-2'-fluoroadenosine-3'-phosphate
  modified_base 10: mod_base = OTHER; note = 2'-O-methyladenosine-3'-phosphate
  modified_base 11: mod_base = OTHER; note = 2'-O-methylguanosine-3'-phosphate
  modified_base 12: mod_base = OTHER; note = 2'-O-methyladenosine-3'-phosphate
  modified_base 13: mod_base = OTHER; note = 2'-O-methyluridine-3'-phosphate
  modified_base 14: mod_base = OTHER; note = 2'-deoxy-2'-fluoroguanosine-3'-phosphate
  modified_base 15: mod_base = OTHER; note = 2'-O-methylguanosine-3'-phosphate
  modified_base 16: mod_base = OTHER; note = 2'-deoxy-2'-fluoroadenosine-3'-phosphate
  modified_base 17: mod_base = OTHER; note = 2'-O-methylguanosine-3'-phosphate
  modified_base 18: mod_base = OTHER; note = 2'-O-methyluridine-3'-phosphate
  modified_base 19: mod_base = OTHER; note = 2'-O-methyluridine-3'-phosphate
  modified_base 20: mod_base = OTHER; note = 2'-O-methylcytidine-3'-phosphate
  modified_base 21: mod_base = OTHER; note = 2'-O-methyladenosine-3'-phosphorothioate
  modified_base 22: mod_base = OTHER; note = 2'-O-methylguanosine-3'-phosphorothioate
  modified_base 23: mod_base = OTHER; note = 2'-O-methylguanosine
tctgcgtaaagatggagttcagg

SEQ ID NO: 4260 - RNA, 23 nt, synthetic construct
  source 1..23: mol_type = other RNA
  modified_base 1: mod_base = OTHER; note = 2'-O-methyluridine-3'-phosphorothioate 5'-(E)-Vinylphosphonate
  modified_base 2: mod_base = OTHER; note = 2'-deoxy-2'-fluoroguanosine-3'-phosphorothioate
  modified_base 3: mod_base = OTHER; note = 2'-O-methyluridine-3'-phosphate
  modified_base 4: mod_base = OTHER; note = 2'-O-methyladenosine-3'-phosphate
  modified_base 5: mod_base = OTHER; note = 2'-O-methylcytidine-3'-phosphate
  modified_base 6: mod_base = OTHER; note = 2'-deoxy-2'-fluorouridine-3'-phosphate
  modified_base 7: mod_base = OTHER; note = 2'-O-methyladenosine-3'-phosphate
  modified_base 8: mod_base = OTHER; note = 2'-deoxy-2'-fluorouridine-3'-phosphate
  modified_base 9: mod_base = OTHER; note = 2'-deoxy-2'-fluoroguanosine-3'-phosphate
  modified_base 10: mod_base = OTHER; note = 2'-O-methyladenosine-3'-phosphate
  modified_base 11: mod_base = OTHER; note = 2'-O-methyluridine-3'-phosphate
  modified_base 12: mod_base = OTHER; note = 2'-O-methylguanosine-3'-phosphate
  modified_base 13: mod_base = OTHER; note = 2'-O-methyladenosine-3'-phosphate
  modified_base 14: mod_base = OTHER; note = 2'-deoxy-2'-fluoroadenosine-3'-phosphate
  modified_base 15: mod_base = OTHER; note = 2'-O-methylguanosine-3'-phosphate
  modified_base 16: mod_base = OTHER; note = 2'-deoxy-2'-fluoroadenosine-3'-phosphate
  modified_base 17: mod_base = OTHER; note = 2'-O-methyladenosine-3'-phosphate
  modified_base 18: mod_base = OTHER; note = 2'-O-methylguanosine-3'-phosphate
  modified_base 19: mod_base = OTHER; note = 2'-O-methylguanosine-3'-phosphate
  modified_base 20: mod_base = OTHER; note = 2'-O-methyladenosine-3'-phosphate
  modified_base 21: mod_base = OTHER; note = 2'-O-methyluridine-3'-phosphorothioate
  modified_base 22: mod_base = OTHER; note = 2'-O-methylguanosine-3'-phosphorothioate
  modified_base 23: mod_base = OTHER; note = 2'-O-methyladenosine
tgtactatgatgaagaaggatga

SEQ ID NO: 4261 - RNA, 23 nt, synthetic construct
  source 1..23: mol_type = other RNA
  modified_base 1: mod_base = OTHER; note = 2'-O-methyluridine-3'-phosphorothioate 5'-(E)-Vinylphosphonate
  modified_base 2: mod_base = OTHER; note = 2'-deoxy-2'-fluoroadenosine-3'-phosphorothioate
  modified_base 3: mod_base = OTHER; note = 2'-O-methylguanosine-3'-phosphate
  modified_base 4: mod_base = OTHER; note = 2'-O-methyluridine-3'-phosphate
  modified_base 5: mod_base = OTHER; note = 2'-O-methyladenosine-3'-phosphate
  modified_base 6: mod_base = OTHER; note = 2'-deoxy-2'-fluorouridine-3'-phosphate
  modified_base 7: mod_base = OTHER; note = 2'-O-methyluridine-3'-phosphate
  modified_base 8: mod_base = OTHER; note = 2'-deoxy-2'-fluorouridine-3'-phosphate
  modified_base 9: mod_base = OTHER; note = 2'-deoxy-2'-fluorouridine-3'-phosphate
  modified_base 10: mod_base = OTHER; note = 2'-O-methylguanosine-3'-phosphate
  modified_base 11: mod_base = OTHER; note = 2'-O-methyluridine-3'-phosphate
  modified_base 12: mod_base = OTHER; note = 2'-O-methyladenosine-3'-phosphate
  modified_base 13: mod_base = OTHER; note = 2'-O-methylguanosine-3'-phosphate
  modified_base 14: mod_base = OTHER; note = 2'-deoxy-2'-fluoroadenosine-3'-phosphate
  modified_base 15: mod_base = OTHER; note = 2'-O-methylguanosine-3'-phosphate
  modified_base 16: mod_base = OTHER; note = 2'-deoxy-2'-fluorouridine-3'-phosphate
  modified_base 17: mod_base = OTHER; note = 2'-O-methylcytidine-3'-phosphate
  modified_base 18: mod_base = OTHER; note = 2'-O-methyladenosine-3'-phosphate
  modified_base 19: mod_base = OTHER; note = 2'-O-methyladenosine-3'-phosphate
  modified_base 20: mod_base = OTHER; note = 2'-O-methylcytidine-3'-phosphate
  modified_base 21: mod_base = OTHER; note = 2'-O-methylcytidine-3'-phosphorothioate
  modified_base 22: mod_base = OTHER; note = 2'-O-methyluridine-3'-phosphorothioate
  modified_base 23: mod_base = OTHER; note = 2'-O-methylguanosine
tagtattttgtagagtcaacctg

SEQ ID NO: 4262 - RNA, 23 nt, synthetic construct
  source 1..23: mol_type = other RNA
  modified_base 1: mod_base = OTHER; note = 2'-O-methyluridine-3'-phosphorothioate 5'-(E)-Vinylphosphonate
  modified_base 2: mod_base = OTHER; note = 2'-deoxy-2'-fluorocytidine-3'-phosphorothioate
  modified_base 3: mod_base = OTHER; note = 2'-O-methyladenosine-3'-phosphate
  modified_base 4: mod_base = OTHER; note = 2'-O-methyluridine-3'-phosphate
  modified_base 5: mod_base = OTHER; note = 2'-O-methyladenosine-3'-phosphate
  modified_base 6: mod_base = OTHER; note = 2'-deoxy-2'-fluoroguanosine-3'-phosphate
  modified_base 7: mod_base = OTHER; note = 2'-O-methyluridine-3'-phosphate
  modified_base 8: mod_base = OTHER; note = 2'-deoxy-2'-fluoroadenosine-3'-phosphate
  modified_base 9: mod_base = OTHER; note = 2'-deoxy-2'-fluorouridine-3'-phosphate
  modified_base 10: mod_base = OTHER; note = 2'-O-methyluridine-3'-phosphate
  modified_base 11: mod_base = OTHER; note = 2'-O-methyluridine-3'-phosphate
  modified_base 12: mod_base = OTHER; note = 2'-O-methyluridine-3'-phosphate
  modified_base 13: mod_base = OTHER; note = 2'-O-methylguanosine-3'-phosphate
  modified_base 14: mod_base = OTHER; note = 2'-deoxy-2'-fluorouridine-3'-phosphate
  modified_base 15: mod_base = OTHER; note = 2'-O-methyladenosine-3'-phosphate
  modified_base 16: mod_base = OTHER; note = 2'-deoxy-2'-fluoroguanosine-3'-phosphate
  modified_base 17: mod_base = OTHER; note = 2'-O-methyladenosine-3'-phosphate
  modified_base 18: mod_base = OTHER; note = 2'-O-methylguanosine-3'-phosphate
  modified_base 19: mod_base = OTHER; note = 2'-O-methyluridine-3'-phosphate
  modified_base 20: mod_base = OTHER; note = 2'-O-methylcytidine-3'-phosphate
  modified_base 21: mod_base = OTHER; note = 2'-O-methyladenosine-3'-phosphorothioate
  modified_base 22: mod_base = OTHER; note = 2'-O-methyladenosine-3'-phosphorothioate
  modified_base 23: mod_base = OTHER; note = 2'-O-methylcytidine
tcatagtattttgtagagtcaac

SEQ ID NO: 4263 - RNA, 23 nt, synthetic construct
  source 1..23: mol_type = other RNA
  modified_base 1: mod_base = OTHER; note = 2'-O-methyluridine-3'-phosphorothioate 5'-(E)-Vinylphosphonate
  modified_base 2: mod_base = OTHER; note = 2'-deoxy-2'-fluorouridine-3'-phosphorothioate
  modified_base 3: mod_base = OTHER; note = 2'-O-methyluridine-3'-phosphate
  modified_base 4: mod_base = OTHER; note = 2'-O-methylcytidine-3'-phosphate
  modified_base 5: mod_base = OTHER; note = 2'-O-methyladenosine-3'-phosphate
  modified_base 6: mod_base = OTHER; note = 2'-deoxy-2'-fluorouridine-3'-phosphate
  modified_base 7: mod_base = OTHER; note = 2'-O-methyladenosine-3'-phosphate
  modified_base 8: mod_base = OTHER; note = 2'-deoxy-2'-fluoroguanosine-3'-phosphate
  modified_base 9: mod_base = OTHER; note = 2'-deoxy-2'-fluorouridine-3'-phosphate
  modified_base 10: mod_base = OTHER; note = 2'-O-methyladenosine-3'-phosphate
  modified_base 11: mod_base = OTHER; note = 2'-O-methyluridine-3'-phosphate
  modified_base 12: mod_base = OTHER; note = 2'-O-methyluridine-3'-phosphate
  modified_base 13: mod_base = OTHER; note = 2'-O-methyluridine-3'-phosphate
  modified_base 14: mod_base = OTHER; note = 2'-deoxy-2'-fluorouridine-3'-phosphate
  modified_base 15: mod_base = OTHER; note = 2'-O-methylguanosine-3'-phosphate
  modified_base 16: mod_base = OTHER; note = 2'-deoxy-2'-fluorouridine-3'-phosphate
  modified_base 17: mod_base = OTHER; note = 2'-O-methyladenosine-3'-phosphate
  modified_base 18: mod_base = OTHER; note = 2'-O-methylguanosine-3'-phosphate
  modified_base 19: mod_base = OTHER; note = 2'-O-methyladenosine-3'-phosphate
  modified_base 20: mod_base = OTHER; note = 2'-O-methylguanosine-3'-phosphate
  modified_base 21: mod_base = OTHER; note = 2'-O-methyluridine-3'-phosphorothioate
  modified_base 22: mod_base = OTHER; note = 2'-O-methylcytidine-3'-phosphorothioate
  modified_base 23: mod_base = OTHER; note = 2'-O-methyladenosine
tttcatagtattttgtagagtca

SEQ ID NO: 4264 - RNA, 23 nt, synthetic construct
  source 1..23: mol_type = other RNA
  modified_base 1: mod_base = OTHER; note = 2'-O-methyluridine-3'-phosphorothioate 5'-(E)-Vinylphosphonate
  modified_base 2: mod_base = OTHER; note = 2'-deoxy-2'-fluorocytidine-3'-phosphorothioate
  modified_base 3: mod_base = OTHER; note = 2'-O-methyluridine-3'-phosphate
  modified_base 4: mod_base = OTHER; note = 2'-O-methyluridine-3'-phosphate
  modified_base 5: mod_base = OTHER; note = 2'-O-methylcytidine-3'-phosphate
  modified_base 6: mod_base = OTHER; note = 2'-deoxy-2'-fluoroadenosine-3'-phosphate
  modified_base 7: mod_base = OTHER; note = 2'-O-methyluridine-3'-phosphate
  modified_base 8: mod_base = OTHER; note = 2'-deoxy-2'-fluoroadenosine-3'-phosphate
  modified_base 9: mod_base = OTHER; note = 2'-deoxy-2'-fluoroguanosine-3'-phosphate
  modified_base 10: mod_base = OTHER; note = 2'-O-methyluridine-3'-phosphate
  modified_base 11: mod_base = OTHER; note = 2'-O-methyladenosine-3'-phosphate
  modified_base 12: mod_base = OTHER; note = 2'-O-methyluridine-3'-phosphate
  modified_base 13: mod_base = OTHER; note = 2'-O-methyluridine-3'-phosphate
  modified_base 14: mod_base = OTHER; note = 2'-deoxy-2'-fluorouridine-3'-phosphate
  modified_base 15: mod_base = OTHER; note = 2'-O-methyluridine-3'-phosphate
  modified_base 16: mod_base = OTHER; note = 2'-deoxy-2'-fluoroguanosine-3'-phosphate
  modified_base 17: mod_base = OTHER; note = 2'-O-methyluridine-3'-phosphate
  modified_base 18: mod_base = OTHER; note = 2'-O-methyladenosine-3'-phosphate
  modified_base 19: mod_base = OTHER; note = 2'-O-methylguanosine-3'-phosphate
  modified_base 20: mod_base = OTHER; note = 2'-O-methyladenosine-3'-phosphate
  modified_base 21: mod_base = OTHER; note = 2'-O-methylguanosine-3'-phosphorothioate
  modified_base 22: mod_base = OTHER; note = 2'-O-methyluridine-3'-phosphorothioate
  modified_base 23: mod_base = OTHER; note = 2'-O-methylcytidine
tcttcatagtattttgtagagtc

SEQ ID NO: 4265 - RNA, 23 nt, synthetic construct
  source 1..23: mol_type = other RNA
  modified_base 1: mod_base = OTHER; note = 2'-O-methyluridine-3'-phosphorothioate 5'-(E)-Vinylphosphonate
  modified_base 2: mod_base = OTHER; note = 2'-deoxy-2'-fluorocytidine-3'-phosphorothioate
  modified_base 3: mod_base = OTHER; note = 2'-O-methylguanosine-3'-phosphate
  modified_base 4: mod_base = OTHER; note = 2'-O-methyladenosine-3'-phosphate
  modified_base 5: mod_base = OTHER; note = 2'-O-methylcytidine-3'-phosphate
  modified_base 6: mod_base = OTHER; note = 2'-deoxy-2'-fluoroadenosine-3'-phosphate
  modified_base 7: mod_base = OTHER; note = 2'-O-methyluridine-3'-phosphate
  modified_base 8: mod_base = OTHER; note = 2'-deoxy-2'-fluoroadenosine-3'-phosphate
  modified_base 9: mod_base = OTHER; note = 2'-deoxy-2'-fluoroguanosine-3'-phosphate
  modified_base 10: mod_base = OTHER; note = 2'-O-methyladenosine-3'-phosphate
  modified_base 11: mod_base = OTHER; note = 2'-O-methyladenosine-3'-phosphate
  modified_base 12: mod_base = OTHER; note = 2'-O-methylguanosine-3'-phosphate
  modified_base 13: mod_base = OTHER; note = 2'-O-methyluridine-3'-phosphate
  modified_base 14: mod_base = OTHER; note = 2'-deoxy-2'-fluorouridine-3'-phosphate
  modified_base 15: mod_base = OTHER; note = 2'-O-methylguanosine-3'-phosphate
  modified_base 16: mod_base = OTHER; note = 2'-deoxy-2'-fluoroadenosine-3'-phosphate
  modified_base 17: mod_base = OTHER; note = 2'-O-methyladenosine-3'-phosphate
  modified_base 18: mod_base = OTHER; note = 2'-O-methylguanosine-3'-phosphate
  modified_base 19: mod_base = OTHER; note = 2'-O-methyluridine-3'-phosphate
  modified_base 20: mod_base = OTHER; note = 2'-O-methylguanosine-3'-phosphate
  modified_base 21: mod_base = OTHER; note = 2'-O-methyladenosine-3'-phosphorothioate
  modified_base 22: mod_base = OTHER; note = 2'-O-methylguanosine-3'-phosphorothioate
  modified_base 23: mod_base = OTHER; note = 2'-O-methyluridine
tcgacatagaagttgaagtgagt

SEQ ID NO: 4266 - RNA, 23 nt, synthetic construct
  source 1..23: mol_type = other RNA
  modified_base 1: mod_base = OTHER; note = 2'-O-methyluridine-3'-phosphorothioate 5'-(E)-Vinylphosphonate
  modified_base 2: mod_base = OTHER; note = 2'-deoxy-2'-fluoroguanosine-3'-phosphorothioate
  modified_base 3: mod_base = OTHER; note = 2'-O-methylcytidine-3'-phosphate
  modified_base 4: mod_base = OTHER; note = 2'-O-methyluridine-3'-phosphate
  modified_base 5: mod_base = OTHER; note = 2'-O-methylguanosine-3'-phosphate
  modified_base 6: mod_base = OTHER; note = 2'-deoxy-2'-fluoroguanosine-3'-phosphate
  modified_base 7: mod_base = OTHER; note = 2'-O-methyladenosine-3'-phosphate
  modified_base 8: mod_base = OTHER; note = 2'-deoxy-2'-fluoroadenosine-3'-phosphate
  modified_base 9: mod_base = OTHER; note = 2'-deoxy-2'-fluoroadenosine-3'-phosphate
  modified_base 10: mod_base = OTHER; note = 2'-O-methylguanosine-3'-phosphate
  modified_base 11: mod_base = OTHER; note = 2'-O-methylguanosine-3'-phosphate
  modified_base 12: mod_base = OTHER; note = 2'-O-methyluridine-3'-phosphate
  modified_base 13: mod_base = OTHER; note = 2'-O-methyladenosine-3'-phosphate
  modified_base 14: mod_base = OTHER; note = 2'-deoxy-2'-fluoroguanosine-3'-phosphate
  modified_base 15: mod_base = OTHER; note = 2'-O-methyladenosine-3'-phosphate
  modified_base 16: mod_base = OTHER; note = 2'-deoxy-2'-fluoroguanosine-3'-phosphate
  modified_base 17: mod_base = OTHER; note = 2'-O-methyladenosine-3'-phosphate
  modified_base 18: mod_base = OTHER; note = 2'-O-methylguanosine-3'-phosphate
  modified_base 19: mod_base = OTHER; note = 2'-O-methyladenosine-3'-phosphate
  modified_base 20: mod_base = OTHER; note = 2'-O-methylcytidine-3'-phosphate
  modified_base 21: mod_base = OTHER; note = 2'-O-methyluridine-3'-phosphorothioate
  modified_base 22: mod_base = OTHER; note = 2'-O-methyladenosine-3'-phosphorothioate
  modified_base 23: mod_base = OTHER; note = 2'-O-methylguanosine
tgctggaaaggtagagagactag

SEQ ID NO: 4267 - RNA, 23 nt, synthetic construct
  source 1..23: mol_type = other RNA
  modified_base 1: mod_base = OTHER; note = 2'-O-methyluridine-3'-phosphorothioate 5'-(E)-Vinylphosphonate
  modified_base 2: mod_base = OTHER; note = 2'-deoxy-2'-fluorocytidine-3'-phosphorothioate
  modified_base 3: mod_base = OTHER; note = 2'-O-methyladenosine-3'-phosphate
  modified_base 4: mod_base = OTHER; note = 2'-O-methylguanosine-3'-phosphate
  modified_base 5: mod_base = OTHER; note = 2'-O-methyluridine-3'-phosphate
  modified_base 6: mod_base = OTHER; note = 2'-deoxy-2'-fluorouridine-3'-phosphate
  modified_base 7: mod_base = OTHER; note = 2'-O-methyluridine-3'-phosphate
  modified_base 8: mod_base = OTHER; note = 2'-deoxy-2'-fluorocytidine-3'-phosphate
  modified_base 9: mod_base = OTHER; note = 2'-deoxy-2'-fluorouridine-3'-phosphate
  modified_base 10: mod_base = OTHER; note = 2'-O-methylguanosine-3'-phosphate
  modified_base 11: mod_base = OTHER; note = 2'-O-methyluridine-3'-phosphate
  modified_base 12: mod_base = OTHER; note = 2'-O-methylcytidine-3'-phosphate
  modified_base 13: mod_base = OTHER; note = 2'-O-methylguanosine-3'-phosphate
  modified_base 14: mod_base = OTHER; note = 2'-deoxy-2'-fluorouridine-3'-phosphate
  modified_base 15: mod_base = OTHER; note = 2'-O-methyluridine-3'-phosphate
  modified_base 16: mod_base = OTHER; note = 2'-deoxy-2'-fluoroguanosine-3'-phosphate
  modified_base 17: mod_base = OTHER; note = 2'-O-methyladenosine-3'-phosphate
  modified_base 18: mod_base = OTHER; note = 2'-O-methylguanosine-3'-phosphate
  modified_base 19: mod_base = OTHER; note = 2'-O-methyladenosine-3'-phosphate
  modified_base 20: mod_base = OTHER; note = 2'-O-methylcytidine-3'-phosphate
  modified_base 21: mod_base = OTHER; note = 2'-O-methylcytidine-3'-phosphorothioate
  modified_base 22: mod_base = OTHER; note = 2'-O-methylguanosine-3'-phosphorothioate
  modified_base 23: mod_base = OTHER; note = 2'-O-methyladenosine
tcagtttctgtcgttgagaccga

SEQ ID NO: 4268 - RNA, 23 nt, synthetic construct
  source 1..23: mol_type = other RNA
  modified_base 1: mod_base = OTHER; note = 2'-O-methyluridine-3'-phosphorothioate 5'-(E)-Vinylphosphonate
  modified_base 2: mod_base = OTHER; note = 2'-deoxy-2'-fluoroadenosine-3'-phosphorothioate
  modified_base 3: mod_base = OTHER; note = 2'-O-methylguanosine-3'-phosphate
  modified_base 4: mod_base = OTHER; note = 2'-O-methyladenosine-3'-phosphate
  modified_base 5: mod_base = OTHER; note = 2'-O-methylcytidine-3'-phosphate
  modified_base 6: mod_base = OTHER; note = 2'-deoxy-2'-fluorouridine-3'-phosphate
  modified_base 7: mod_base = OTHER; note = 2'-O-methyladenosine-3'-phosphate
  modified_base 8: mod_base = OTHER; note = 2'-deoxy-2'-fluoroguanosine-3'-phosphate
  modified_base 9: mod_base = OTHER; note = 2'-deoxy-2'-fluorouridine-3'-phosphate
  modified_base 10: mod_base = OTHER; note = 2'-O-methylguanosine-3'-phosphate
  modified_base 11: mod_base = OTHER; note = 2'-O-methyluridine-3'-phosphate
  modified_base 12: mod_base = OTHER; note = 2'-O-methyluridine-3'-phosphate
  modified_base 13: mod_base = OTHER; note = 2'-O-methylguanosine-3'-phosphate
  modified_base 14: mod_base = OTHER; note = 2'-deoxy-2'-fluoroguanosine-3'-phosphate
  modified_base 15: mod_base = OTHER; note = 2'-O-methylguanosine-3'-phosphate
  modified_base 16: mod_base = OTHER; note = 2'-deoxy-2'-fluoroadenosine-3'-phosphate
  modified_base 17: mod_base = OTHER; note = 2'-O-methyladenosine-3'-phosphate
  modified_base 18: mod_base = OTHER; note = 2'-O-methylguanosine-3'-phosphate
  modified_base 19: mod_base = OTHER; note = 2'-O-methyladenosine-3'-phosphate
  modified_base 20: mod_base = OTHER; note = 2'-O-methylguanosine-3'-phosphate
  modified_base 21: mod_base = OTHER; note = 2'-O-methylguanosine-3'-phosphorothioate
  modified_base 22: mod_base = OTHER; note = 2'-O-methylcytidine-3'-phosphorothioate
  modified_base 23: mod_base = OTHER; note = 2'-O-methyladenosine
tagactagtgttgggaagaggca

SEQ ID NO: 4269 - RNA, 23 nt, synthetic construct
  source 1..23: mol_type = other RNA
  modified_base 1: mod_base = OTHER; note = 2'-O-methyluridine-3'-phosphorothioate 5'-(E)-Vinylphosphonate
  modified_base 2: mod_base = OTHER; note = 2'-deoxy-2'-fluoroguanosine-3'-phosphorothioate
  modified_base 3: mod_base = OTHER; note = 2'-O-methyluridine-3'-phosphate
  modified_base 4: mod_base = OTHER; note = 2'-O-methyladenosine-3'-phosphate
  modified_base 5: mod_base = OTHER; note = 2'-O-methyluridine-3'-phosphate
  modified_base 6: mod_base = OTHER; note = 2'-deoxy-2'-fluoroadenosine-3'-phosphate
  modified_base 7: mod_base = OTHER; note = 2'-O-methyluridine-3'-phosphate
  modified_base 8: mod_base = OTHER; note = 2'-deoxy-2'-fluorouridine-3'-phosphate
  modified_base 9: mod_base = OTHER; note = 2'-deoxy-2'-fluoroguanosine-3'-phosphate
  modified_base 10: mod_base = OTHER; note = 2'-O-methyluridine-3'-phosphate
  modified_base 11: mod_base = OTHER; note = 2'-O-methyladenosine-3'-phosphate
  modified_base 12: mod_base = OTHER; note = 2'-O-methylguanosine-3'-phosphate
  modified_base 13: mod_base = OTHER; note = 2'-O-methyluridine-3'-phosphate
  modified_base 14: mod_base = OTHER; note = 2'-deoxy-2'-fluorouridine-3'-phosphate
  modified_base 15: mod_base = OTHER; note = 2'-O-methyladenosine-3'-phosphate
  modified_base 16: mod_base = OTHER; note = 2'-deoxy-2'-fluoroadenosine-3'-phosphate
  modified_base 17: mod_base = OTHER; note = 2'-O-methyladenosine-3'-phosphate
  modified_base 18: mod_base = OTHER; note = 2'-O-methylguanosine-3'-phosphate
  modified_base 19: mod_base = OTHER; note = 2'-O-methylcytidine-3'-phosphate
  modified_base 20: mod_base = OTHER; note = 2'-O-methyladenosine-3'-phosphate
  modified_base 21: mod_base = OTHER; note = 2'-O-methylcytidine-3'-phosphorothioate
  modified_base 22: mod_base = OTHER; note = 2'-O-methyladenosine-3'-phosphorothioate
  modified_base 23: mod_base = OTHER; note = 2'-O-methyluridine
tgtatattgtagttaaagcacat

SEQ ID NO: 4270 - RNA, 23 nt, synthetic construct
  source 1..23: mol_type = other RNA
  modified_base 1: mod_base = OTHER; note = 2'-O-methyluridine-3'-phosphorothioate 5'-(E)-Vinylphosphonate
  modified_base 2: mod_base = OTHER; note = 2'-deoxy-2'-fluorocytidine-3'-phosphorothioate
  modified_base 3: mod_base = OTHER; note = 2'-O-methylguanosine-3'-phosphate
  modified_base 4: mod_base = OTHER; note = 2'-O-methylguanosine-3'-phosphate
  modified_base 5: mod_base = OTHER; note = 2'-O-methyluridine-3'-phosphate
  modified_base 6: mod_base = OTHER; note = 2'-deoxy-2'-fluorouridine-3'-phosphate
  modified_base 7: mod_base = OTHER; note = 2'-O-methyladenosine-3'-phosphate
  modified_base 8: mod_base = OTHER; note = 2'-deoxy-2'-fluoroguanosine-3'-phosphate
  modified_base 9: mod_base = OTHER; note = 2'-deoxy-2'-fluorouridine-3'-phosphate
  modified_base 10: mod_base = OTHER; note = 2'-O-methylcytidine-3'-phosphate
  modified_base 11: mod_base = OTHER; note = 2'-O-methyluridine-3'-phosphate
  modified_base 12: mod_base = OTHER; note = 2'-O-methylguanosine-3'-phosphate
  modified_base 13: mod_base = OTHER; note = 2'-O-methyladenosine-3'-phosphate
  modified_base 14: mod_base = OTHER; note = 2'-deoxy-2'-fluoroadenosine-3'-phosphate
  modified_base 15: mod_base = OTHER; note = 2'-O-methyladenosine-3'-phosphate
  modified_base 16: mod_base = OTHER; note = 2'-deoxy-2'-fluoroguanosine-3'-phosphate
  modified_base 17: mod_base = OTHER; note = 2'-O-methylguanosine-3'-phosphate
  modified_base 18: mod_base = OTHER; note = 2'-O-methyluridine-3'-phosphate
  modified_base 19: mod_base = OTHER; note = 2'-O-methylguanosine-3'-phosphate
  modified_base 20: mod_base = OTHER; note = 2'-O-methylguanosine-3'-phosphate
  modified_base 21: mod_base = OTHER; note = 2'-O-methyladenosine-3'-phosphorothioate
  modified_base 22: mod_base = OTHER; note = 2'-O-methylcytidine-3'-phosphorothioate
  modified_base 23: mod_base = OTHER; note = 2'-O-methyluridine
tcggttagtctgaaaggtggact

SEQ ID NO: 4271 - RNA, 23 nt, synthetic construct
  source 1..23: mol_type = other RNA
  modified_base 1: mod_base = OTHER; note = 2'-O-methyluridine-3'-phosphorothioate 5'-(E)-Vinylphosphonate
  modified_base 2: mod_base = OTHER; note = 2'-deoxy-2'-fluoroadenosine-3'-phosphorothioate
  modified_base 3: mod_base = OTHER; note = 2'-O-methylcytidine-3'-phosphate
  modified_base 4: mod_base = OTHER; note = 2'-O-methylguanosine-3'-phosphate
  modified_base 5: mod_base = OTHER; note = 2'-O-methylguanosine-3'-phosphate
  modified_base 6: mod_base = OTHER; note = 2'-deoxy-2'-fluorouridine-3'-phosphate
  modified_base 7: mod_base = OTHER; note = 2'-O-methyluridine-3'-phosphate
  modified_base 8: mod_base = OTHER; note = 2'-deoxy-2'-fluoroadenosine-3'-phosphate
  modified_base 9: mod_base = OTHER; note = 2'-deoxy-2'-fluoroguanosine-3'-phosphate
  modified_base 10: mod_base = OTHER; note = 2'-O-methyluridine-3'-phosphate
  modified_base 11: mod_base = OTHER; note = 2'-O-methylcytidine-3'-phosphate
  modified_base 12: mod_base = OTHER; note = 2'-O-methyluridine-3'-phosphate
  modified_base 13: mod_base = OTHER; note = 2'-O-methylguanosine-3'-phosphate
  modified_base 14: mod_base = OTHER; note = 2'-deoxy-2'-fluoroadenosine-3'-phosphate
  modified_base 15: mod_base = OTHER; note = 2'-O-methyladenosine-3'-phosphate
  modified_base 16: mod_base = OTHER; note = 2'-deoxy-2'-fluoroadenosine-3'-phosphate
  modified_base 17: mod_base = OTHER; note = 2'-O-methylguanosine-3'-phosphate
  modified_base 18: mod_base = OTHER; note = 2'-O-methylguanosine-3'-phosphate
  modified_base 19: mod_base = OTHER; note = 2'-O-methyluridine-3'-phosphate
  modified_base 20: mod_base = OTHER; note = 2'-O-methylguanosine-3'-phosphate
  modified_base 21: mod_base = OTHER; note = 2'-O-methylguanosine-3'-phosphorothioate
  modified_base 22: mod_base = OTHER; note = 2'-O-methyladenosine-3'-phosphorothioate
  modified_base 23: mod_base = OTHER; note = 2'-O-methylcytidine
tacggttagtctgaaaggtggac

SEQ ID NO: 4272 - RNA, 23 nt, synthetic construct
  source 1..23: mol_type = other RNA
  modified_base 1: mod_base = OTHER; note = 2'-O-methyluridine-3'-phosphorothioate 5'-(E)-Vinylphosphonate
  modified_base 2: mod_base = OTHER; note = 2'-deoxy-2'-fluoroguanosine-3'-phosphorothioate
  modified_base 3: mod_base = OTHER; note = 2'-O-methyladenosine-3'-phosphate
  modified_base 4: mod_base = OTHER; note = 2'-O-methylcytidine-3'-phosphate
  modified_base 5: mod_base = OTHER; note = 2'-O-methylguanosine-3'-phosphate
  modified_base 6: mod_base = OTHER; note = 2'-deoxy-2'-fluoroguanosine-3'-phosphate
  modified_base 7: mod_base = OTHER; note = 2'-O-methyluridine-3'-phosphate
  modified_base 8: mod_base = OTHER; note = 2'-deoxy-2'-fluorouridine-3'-phosphate
  modified_base 9: mod_base = OTHER; note = 2'-deoxy-2'-fluoroadenosine-3'-phosphate
  modified_base 10: mod_base = OTHER; note = 2'-O-methylguanosine-3'-phosphate
  modified_base 11: mod_base = OTHER; note = 2'-O-methyluridine-3'-phosphate
  modified_base 12: mod_base = OTHER; note = 2'-O-methylcytidine-3'-phosphate
  modified_base 13: mod_base = OTHER; note = 2'-O-methyluridine-3'-phosphate
  modified_base 14: mod_base = OTHER; note = 2'-deoxy-2'-fluoroguanosine-3'-phosphate
  modified_base 15: mod_base = OTHER; note = 2'-O-methyladenosine-3'-phosphate
  modified_base 16: mod_base = OTHER; note = 2'-deoxy-2'-fluoroadenosine-3'-phosphate
  modified_base 17: mod_base = OTHER; note = 2'-O-methyladenosine-3'-phosphate
  modified_base 18: mod_base = OTHER; note = 2'-O-methylguanosine-3'-phosphate
  modified_base 19: mod_base = OTHER; note = 2'-O-methylguanosine-3'-phosphate
  modified_base 20: mod_base = OTHER; note = 2'-O-methyluridine-3'-phosphate
  modified_base 21: mod_base = OTHER; note = 2'-O-methylguanosine-3'-phosphorothioate
  modified_base 22: mod_base = OTHER; note = 2'-O-methylguanosine-3'-phosphorothioate
  modified_base 23: mod_base = OTHER; note = 2'-O-methyladenosine
tgacggttagtctgaaaggtgga

SEQ ID NO: 4273 - RNA, 23 nt, synthetic construct
  source 1..23: mol_type = other RNA
  modified_base 1: mod_base = OTHER; note = 2'-O-methyluridine-3'-phosphorothioate 5'-(E)-Vinylphosphonate
  modified_base 2: mod_base = OTHER; note = 2'-deoxy-2'-fluorouridine-3'-phosphorothioate
  modified_base 3: mod_base = OTHER; note = 2'-O-methylcytidine-3'-phosphate
  modified_base 4: mod_base = OTHER; note = 2'-O-methyluridine-3'-phosphate
  modified_base 5: mod_base = OTHER; note = 2'-O-methyluridine-3'-phosphate
  modified_base 6: mod_base = OTHER; note = 2'-deoxy-2'-fluoroadenosine-3'-phosphate
  modified_base 7: mod_base = OTHER; note = 2'-O-methyluridine-3'-phosphate
  modified_base 8: mod_base = OTHER; note = 2'-deoxy-2'-fluorouridine-3'-phosphate
  modified_base 9: mod_base = OTHER; note = 2'-deoxy-2'-fluoroguanosine-3'-phosphate
  modified_base 10: mod_base = OTHER; note = 2'-O-methyluridine-3'-phosphate
  modified_base 11: mod_base = OTHER; note = 2'-O-methyladenosine-3'-phosphate
  modified_base 12: mod_base = OTHER; note = 2'-O-methylguanosine-3'-phosphate
  modified_base 13: mod_base = OTHER; note = 2'-O-methyladenosine-3'-phosphate
  modified_base 14: mod_base = OTHER; note = 2'-deoxy-2'-fluorouridine-3'-phosphate
  modified_base 15: mod_base = OTHER; note = 2'-O-methylguanosine-3'-phosphate
  modified_base 16: mod_base = OTHER; note = 2'-deoxy-2'-fluoroadenosine-3'-phosphate
  modified_base 17: mod_base = OTHER; note = 2'-O-methyluridine-3'-phosphate
  modified_base 18: mod_base = OTHER; note = 2'-O-methyladenosine-3'-phosphate
  modified_base 19: mod_base = OTHER; note = 2'-O-methyluridine-3'-phosphate
  modified_base 20: mod_base = OTHER; note = 2'-O-methylcytidine-3'-phosphate
  modified_base 21: mod_base = OTHER; note = 2'-O-methylcytidine-3'-phosphorothioate
  modified_base 22: mod_base = OTHER; note = 2'-O-methylcytidine-3'-phosphorothioate
  modified_base 23: mod_base = OTHER; note = 2'-O-methylcytidine
ttcttattgtagatgatatcccc

SEQ ID NO: 4274 - RNA, 23 nt, synthetic construct
  source 1..23: mol_type = other RNA
  modified_base 1: mod_base = OTHER; note = 2'-O-methyluridine-3'-phosphorothioate 5'-(E)-Vinylphosphonate
  modified_base 2: mod_base = OTHER; note = 2'-deoxy-2'-fluoroguanosine-3'-phosphorothioate
  modified_base 3: mod_base = OTHER; note = 2'-O-methylcytidine-3'-phosphate
  modified_base 4: mod_base = OTHER; note = 2'-O-methyladenosine-3'-phosphate
  modified_base 5: mod_base = OTHER; note = 2'-O-methyladenosine-3'-phosphate
  modified_base 6: mod_base = OTHER; note = 2'-deoxy-2'-fluoroadenosine-3'-phosphate
  modified_base 7: mod_base = OTHER; note = 2'-O-methylguanosine-3'-phosphate
  modified_base 8: mod_base = OTHER; note = 2'-deoxy-2'-fluoroguanosine-3'-phosphate
  modified_base 9: mod_base = OTHER; note = 2'-deoxy-2'-fluorouridine-3'-phosphate
  modified_base 10: mod_base = OTHER; note = 2'-O-methyladenosine-3'-phosphate
  modified_base 11: mod_base = OTHER; note = 2'-O-methylcytidine-3'-phosphate
  modified_base 12: mod_base = OTHER; note = 2'-O-methyladenosine-3'-phosphate
  modified_base 13: mod_base = OTHER; note = 2'-O-methylguanosine-3'-phosphate
  modified_base 14: mod_base = OTHER; note = 2'-deoxy-2'-fluorouridine-3'-phosphate
  modified_base 15: mod_base = OTHER; note = 2'-O-methylguanosine-3'-phosphate
  modified_base 16: mod_base = OTHER; note = 2'-deoxy-2'-fluoroguanosine-3'-phosphate
  modified_base 17: mod_base = OTHER; note = 2'-O-methyluridine-3'-phosphate
  modified_base 18: mod_base = OTHER; note = 2'-O-methyladenosine-3'-phosphate
  modified_base 19: mod_base = OTHER; note = 2'-O-methylguanosine-3'-phosphate
  modified_base 20: mod_base = OTHER; note = 2'-O-methyladenosine-3'-phosphate
  modified_base 21: mod_base = OTHER; note = 2'-O-methylguanosine-3'-phosphorothioate
  modified_base 22: mod_base = OTHER; note = 2'-O-methylguanosine-3'-phosphorothioate
  modified_base 23: mod_base = OTHER; note = 2'-O-methyladenosine
tgcaaaggtacagtggtagagga

SEQ ID NO: 4275 - RNA, 23 nt, synthetic construct
  source 1..23: mol_type = other RNA
  modified_base 1: mod_base = OTHER; note = 2'-O-methyluridine-3'-phosphorothioate 5'-(E)-Vinylphosphonate
  modified_base 2: mod_base = OTHER; note = 2'-deoxy-2'-fluoroadenosine-3'-phosphorothioate
  modified_base 3: mod_base = OTHER; note = 2'-O-methylguanosine-3'-phosphate
  modified_base 4: mod_base = OTHER; note = 2'-O-methylguanosine-3'-phosphate
  modified_base 5: mod_base = OTHER; note = 2'-O-methylcytidine-3'-phosphate
  modified_base 6: mod_base = OTHER; note = 2'-deoxy-2'-fluoroadenosine-3'-phosphate
  modified_base 7: mod_base = OTHER; note = 2'-O-methyladenosine-3'-phosphate
  modified_base 8: mod_base = OTHER; note = 2'-deoxy-2'-fluoroadenosine-3'-phosphate
  modified_base 9: mod_base = OTHER; note = 2'-deoxy-2'-fluoroguanosine-3'-phosphate
  modified_base 10: mod_base = OTHER; note = 2'-O-methylguanosine-3'-phosphate
  modified_base 11: mod_base = OTHER; note = 2'-O-methyluridine-3'-phosphate
  modified_base 12: mod_base = OTHER; note = 2'-O-methyladenosine-3'-phosphate
  modified_base 13: mod_base = OTHER; note = 2'-O-methylcytidine-3'-phosphate
  modified_base 14: mod_base = OTHER; note = 2'-deoxy-2'-fluoroadenosine-3'-phosphate
  modified_base 15: mod_base = OTHER; note = 2'-O-methylguanosine-3'-phosphate
  modified_base 16: mod_base = OTHER; note = 2'-deoxy-2'-fluorouridine-3'-phosphate
  modified_base 17: mod_base = OTHER; note = 2'-O-methylguanosine-3'-phosphate
  modified_base 18: mod_base = OTHER; note = 2'-O-methylguanosine-3'-phosphate
  modified_base 19: mod_base = OTHER; note = 2'-O-methyluridine-3'-phosphate
  modified_base 20: mod_base = OTHER; note = 2'-O-methyladenosine-3'-phosphate
  modified_base 21: mod_base = OTHER; note = 2'-O-methylguanosine-3'-phosphorothioate
  modified_base 22: mod_base = OTHER; note = 2'-O-methyladenosine-3'-phosphorothioate
  modified_base 23: mod_base = OTHER; note = 2'-O-methylguanosine
taggcaaaggtacagtggtagag

SEQ ID NO: 4276 - RNA, 23 nt, synthetic construct
  source 1..23: mol_type = other RNA
  modified_base 1: mod_base = OTHER; note = 2'-O-methyluridine-3'-phosphorothioate 5'-(E)-Vinylphosphonate
  modified_base 2: mod_base = OTHER; note = 2'-deoxy-2'-fluoroadenosine-3'-phosphorothioate
  modified_base 3: mod_base = OTHER; note = 2'-O-methylguanosine-3'-phosphate
  modified_base 4: mod_base = OTHER; note = 2'-O-methyladenosine-3'-phosphate
  modified_base 5: mod_base = OTHER; note = 2'-O-methyladenosine-3'-phosphate
  modified_base 6: mod_base = OTHER; note = 2'-deoxy-2'-fluorouridine-3'-phosphate
  modified_base 7: mod_base = OTHER; note = 2'-O-methylguanosine-3'-phosphate
  modified_base 8: mod_base = OTHER; note = 2'-deoxy-2'-fluoroadenosine-3'-phosphate
  modified_base 9: mod_base = OTHER; note = 2'-deoxy-2'-fluorouridine-3'-phosphate
  modified_base 10: mod_base = OTHER; note = 2'-O-methyluridine-3'-phosphate
  modified_base 11: mod_base = OTHER; note = 2'-O-methyluridine-3'-phosphate
  modified_base 12: mod_base = OTHER; note = 2'-O-methylguanosine-3'-phosphate
  modified_base 13: mod_base = OTHER; note = 2'-O-methyladenosine-3'-phosphate
  modified_base 14: mod_base = OTHER; note = 2'-deoxy-2'-fluorouridine-3'-phosphate
  modified_base 15: mod_base = OTHER; note = 2'-O-methyluridine-3'-phosphate
  modified_base 16: mod_base = OTHER; note = 2'-deoxy-2'-fluoroguanosine-3'-phosphate
  modified_base 17: mod_base = OTHER; note = 2'-O-methyluridine-3'-phosphate
  modified_base 18: mod_base = OTHER; note = 2'-O-methyluridine-3'-phosphate
  modified_base 19: mod_base = OTHER; note = 2'-O-methylguanosine-3'-phosphate
  modified_base 20: mod_base = OTHER; note = 2'-O-methylcytidine-3'-phosphate
  modified_base 21: mod_base = OTHER; note = 2'-O-methylcytidine-3'-phosphorothioate
  modified_base 22: mod_base = OTHER; note = 2'-O-methylcytidine-3'-phosphorothioate
  modified_base 23: mod_base = OTHER; note = 2'-O-methyluridine
tagaatgatttgattgttgccct

SEQ ID NO: 4277 - RNA, 23 nt, synthetic construct
  source 1..23: mol_type = other RNA
  modified_base 1: mod_base = OTHER; note = 2'-O-methyluridine-3'-phosphorothioate 5'-(E)-Vinylphosphonate
  modified_base 2: mod_base = OTHER; note = 2'-deoxy-2'-fluorocytidine-3'-phosphorothioate
  modified_base 3: mod_base = OTHER; note = 2'-O-methyladenosine-3'-phosphate
  modified_base 4: mod_base = OTHER; note = 2'-O-methylcytidine-3'-phosphate
  modified_base 5: mod_base = OTHER; note = 2'-O-methyluridine-3'-phosphate
  modified_base 6: mod_base = OTHER; note = 2'-deoxy-2'-fluorocytidine-3'-phosphate
  modified_base 7: mod_base = OTHER; note = 2'-O-methylguanosine-3'-phosphate
  modified_base 8: mod_base = OTHER; note = 2'-deoxy-2'-fluorouridine-3'-phosphate
  modified_base 9: mod_base = OTHER; note = 2'-deoxy-2'-fluoroadenosine-3'-phosphate
  modified_base 10: mod_base = OTHER; note = 2'-O-methylguanosine-3'-phosphate
  modified_base 11: mod_base = OTHER; note = 2'-O-methyluridine-3'-phosphate
  modified_base 12: mod_base = OTHER; note = 2'-O-methylguanosine-3'-phosphate
  modified_base 13: mod_base = OTHER; note = 2'-O-methylguanosine-3'-phosphate
  modified_base 14: mod_base = OTHER; note = 2'-deoxy-2'-fluoroadenosine-3'-phosphate
  modified_base 15: mod_base = OTHER; note = 2'-O-methyladenosine-3'-phosphate
  modified_base 16: mod_base = OTHER; note = 2'-deoxy-2'-fluoroguanosine-3'-phosphate
  modified_base 17: mod_base = OTHER; note = 2'-O-methyluridine-3'-phosphate
  modified_base 18: mod_base = OTHER; note = 2'-O-methylguanosine-3'-phosphate
  modified_base 19: mod_base = OTHER; note = 2'-O-methylguanosine-3'-phosphate
  modified_base 20: mod_base = OTHER; note = 2'-O-methylcytidine-3'-phosphate
  modified_base 21: mod_base = OTHER; note = 2'-O-methyladenosine-3'-phosphorothioate
  modified_base 22: mod_base = OTHER; note = 2'-O-methyladenosine-3'-phosphorothioate
  modified_base 23: mod_base = OTHER; note = 2'-O-methylguanosine
tcactcgtagtggaagtggcaag

SEQ ID NO: 4278 - RNA, 23 nt, synthetic construct
  source 1..23: mol_type = other RNA
  modified_base 1: mod_base = OTHER; note = 2'-O-methyluridine-3'-phosphorothioate 5'-(E)-Vinylphosphonate
  modified_base 2: mod_base = OTHER; note = 2'-deoxy-2'-fluorouridine-3'-phosphorothioate
  modified_base 3: mod_base = OTHER; note = 2'-O-methylcytidine-3'-phosphate
  modified_base 4: mod_base = OTHER; note = 2'-O-methyladenosine-3'-phosphate
  modified_base 5: mod_base = OTHER; note = 2'-O-methylcytidine-3'-phosphate
  modified_base 6: mod_base = OTHER; note = 2'-deoxy-2'-fluoroadenosine-3'-phosphate
  modified_base 7: mod_base = OTHER; note = 2'-O-methylcytidine-3'-phosphate
  modified_base 8: mod_base = OTHER; note = 2'-deoxy-2'-fluorouridine-3'-phosphate
  modified_base 9: mod_base = OTHER; note = 2'-deoxy-2'-fluorocytidine-3'-phosphate
  modified_base 10: mod_base = OTHER; note = 2'-O-methylguanosine-3'-phosphate
  modified_base 11: mod_base = OTHER; note = 2'-O-methyluridine-3'-phosphate
  modified_base 12: mod_base = OTHER; note = 2'-O-methyladenosine-3'-phosphate
  modified_base 13: mod_base = OTHER; note = 2'-O-methylguanosine-3'-phosphate
  modified_base 14: mod_base = OTHER; note = 2'-deoxy-2'-fluorouridine-3'-phosphate
  modified_base 15: mod_base = OTHER; note = 2'-O-methylguanosine-3'-phosphate
  modified_base 16: mod_base = OTHER; note = 2'-deoxy-2'-fluoroguanosine-3'-phosphate
  modified_base 17: mod_base = OTHER; note = 2'-O-methyladenosine-3'-phosphate
  modified_base 18: mod_base = OTHER; note = 2'-O-methyladenosine-3'-phosphate
  modified_base 19: mod_base = OTHER; note = 2'-O-methylguanosine-3'-phosphate
  modified_base 20: mod_base = OTHER; note = 2'-O-methyluridine-3'-phosphate
  modified_base 21: mod_base = OTHER; note = 2'-O-methylguanosine-3'-phosphorothioate
  modified_base 22: mod_base = OTHER; note = 2'-O-methylguanosine-3'-phosphorothioate
  modified_base 23: mod_base = OTHER; note = 2'-O-methylcytidine
ttcacactcgtagtggaagtggc

SEQ ID NO: 4279 - RNA, 23 nt, synthetic construct
  source 1..23: mol_type = other RNA
  modified_base 1: mod_base = OTHER; note = 2'-O-methyluridine-3'-phosphorothioate 5'-(E)-Vinylphosphonate
  modified_base 2: mod_base = OTHER; note = 2'-deoxy-2'-fluorocytidine-3'-phosphorothioate
  modified_base 3: mod_base = OTHER; note = 2'-O-methyluridine-3'-phosphate
  modified_base 4: mod_base = OTHER; note = 2'-O-methyluridine-3'-phosphate
  modified_base 5: mod_base = OTHER; note = 2'-O-methylcytidine-3'-phosphate
  modified_base 6: mod_base = OTHER; note = 2'-deoxy-2'-fluorouridine-3'-phosphate
  modified_base 7: mod_base = OTHER; note = 2'-O-methylguanosine-3'-phosphate
  modified_base 8: mod_base = OTHER; note = 2'-deoxy-2'-fluoroadenosine-3'-phosphate
  modified_base 9: mod_base = OTHER; note = 2'-deoxy-2'-fluoroadenosine-3'-phosphate
  modified_base 10: mod_base = OTHER; note = 2'-O-methylguanosine-3'-phosphate
  modified_base 11: mod_base = OTHER; note = 2'-O-methyladenosine-3'-phosphate
  modified_base 12: mod_base = OTHER; note = 2'-O-methyladenosine-3'-phosphate
  modified_base 13: mod_base = OTHER; note = 2'-O-methylguanosine-3'-phosphate
  modified_base 14: mod_base = OTHER; note = 2'-deoxy-2'-fluoroguanosine-3'-phosphate
  modified_base 15: mod_base = OTHER; note = 2'-O-methylcytidine-3'-phosphate
  modified_base 16: mod_base = OTHER; note = 2'-deoxy-2'-fluoroadenosine-3'-phosphate
  modified_base 17: mod_base = OTHER; note = 2'-O-methyluridine-3'-phosphate
  modified_base 18: mod_base = OTHER; note = 2'-O-methylcytidine-3'-phosphate
  modified_base 19: mod_base = OTHER; note = 2'-O-methyluridine-3'-phosphate
  modified_base 20: mod_base = OTHER; note = 2'-O-methylguanosine-3'-phosphate
  modified_base 21: mod_base = OTHER; note = 2'-O-methylguanosine-3'-phosphorothioate
  modified_base 22: mod_base = OTHER; note = 2'-O-methyladenosine-3'-phosphorothioate
  modified_base 23: mod_base = OTHER; note = 2'-O-methylguanosine
tcttctgaagaaggcatctggag

SEQ ID NO: 4280 - RNA, 23 nt, synthetic construct
  source 1..23: mol_type = other RNA
tcccagctgtcagtgagttctac

SEQ ID NO: 4281 - RNA, 23 nt, synthetic construct
  source 1..23: mol_type = other RNA
cctgaactccatctttacgcaga

SEQ ID NO: 4282 - RNA, 23 nt, synthetic construct
  source 1..23: mol_type = other RNA
tcatccttcttcatcatagtaca

SEQ ID NO: 4283 - RNA, 23 nt, synthetic construct
  source 1..23: mol_type = other RNA
caggttgactctacaaaatacta

SEQ ID NO: 4284 - RNA, 23 nt, synthetic construct
  source 1..23: mol_type = other RNA
gttgactctacaaaatactatga

SEQ ID NO: 4285 - RNA, 23 nt, synthetic construct
  source 1..23: mol_type = other RNA
tgactctacaaaatactatgaag

SEQ ID NO: 4286 - RNA, 23 nt, synthetic construct
  source 1..23: mol_type = other RNA
gactctacaaaatactatgaagc

SEQ ID NO: 4287 - RNA, 23 nt, synthetic construct
  source 1..23: mol_type = other RNA
actcacttcaacttctatgtcgt

SEQ ID NO: 4288 - RNA, 23 nt, synthetic construct
  source 1..23: mol_type = other RNA
ctagtctctctacctttccagcc

SEQ ID NO: 4289 - RNA, 23 nt, synthetic construct
  source 1..23: mol_type = other RNA
tcggtctcaacgacagaaactgc

SEQ ID NO: 4290 - RNA, 23 nt, synthetic construct
  source 1..23: mol_type = other RNA
tgcctcttcccaacactagtctg

SEQ ID NO: 4291 - RNA, 23 nt, synthetic construct
  source 1..23: mol_type = other RNA
atgtgctttaactacaatatacg

SEQ ID NO: 4292 - RNA, 23 nt, synthetic construct
  source 1..23: mol_type = other RNA
agtccacctttcagactaaccgt

SEQ ID NO: 4293 - RNA, 23 nt, synthetic construct
  source 1..23: mol_type = other RNA
gtccacctttcagactaaccgtc

SEQ ID NO: 4294 - RNA, 23 nt, synthetic construct
  source 1..23: mol_type = other RNA
tccacctttcagactaaccgtcc

SEQ ID NO: 4295 - RNA, 23 nt, synthetic construct
  source 1..23: mol_type = other RNA
ggggatatcatctacaataagac

SEQ ID NO: 4296 - RNA, 23 nt, synthetic construct
  source 1..23: mol_type = other RNA
tcctctaccactgtacctttgcc

SEQ ID NO: 4297 - RNA, 23 nt, synthetic construct
  source 1..23: mol_type = other RNA
ctctaccactgtacctttgcctc

SEQ ID NO: 4298 - RNA, 23 nt, synthetic construct
  source 1..23: mol_type = other RNA
agggcaacaatcaaatcattctc

SEQ ID NO: 4299 - RNA, 23 nt, synthetic construct
  source 1..23: mol_type = other RNA
cttgccacttccactacgagtgt

SEQ ID NO: 4300 - RNA, 23 nt, synthetic construct
  source 1..23: mol_type = other RNA
gccacttccactacgagtgtgaa

SEQ ID NO: 4301 - RNA, 23 nt, synthetic construct
  source 1..23: mol_type = other RNA
ctccagatgccttcttcagaagc
